(19) United States
(12) Patent Application Publication
(10) Pub. No.: US 2021/0269551 A1
(43) Pub. Date: Sep. 2, 2021

(54) Trispecific T cell Engagers

(71) Applicant: Gensun Biopharma Inc., Newbury Park, CA (US)

(72) Inventors: Margaret Karow, Newbury Park, CA (US); Richard Yau, Newbury Park, CA (US); Jackie Sheng, Newbury Park, CA (US)

(73) Assignee: Gensun Biopharma Inc., Newbury Park, CA (US)

(21) Appl. No.: 17/164,696

(22) Filed: Feb. 1, 2021

Related U.S. Application Data
(60) Provisional application No. 62/981,048, filed on Feb. 25, 2020.

(51) Int. Cl. C07K 16/30; C07K 16/28; A61K 39/395; A61K 45/06

(52) U.S. Cl. CPC C07K 16/3092; C07K 2317/74; C07K 16/28; C07K 16/2818; C07K 16/2809; A61K 39/39558; A61K 45/06; C07K 2317/31; C07K 2317/622; C07K 2317/55; C07K 2317/52; C07K 2317/75; C07K 2317/732; C07K 2319/33; C07K 2317/24; C07K 16/30

(57) ABSTRACT

Provided are trispecific T Cell Engagers or TSMAb's, antibodies that can simultaneously engage three different types of epitopes on the same target or on different targets. More specifically, the invention is directed to trispecific molecules that bind to DLL3, MUC17 or CLDN18.2 and activate CD (cluster of differentiation) molecules (e.g. CD3, CD28 and CD137). Also provided are methods of treating an ailment such as cancer using an antibody (or fragment) against DLL3, MUC17 or CLD18 paired with an antibody (or fragment) of an agonist antibody that activates CD3, CD28 and/or CD137.

### RELATED APPLICATIONS

[0001] This application claims priority to U.S. provisional patent application Ser. No. 62/968,999 filed on Jan. 31, 2020, U.S. provisional patent application Ser. No. 62/981,048 filed on Feb. 25, 2020 and U.S. provisional patent application Ser. No. 62/991,070 filed on Mar. 17, 2020. The contents of the aforementioned applications are incorporated herein by reference.

### REFERENCE TO SEQUENCE LISTING

[0002] The instant application contains a Sequence Listing which has been submitted electronically in ASCII format and is hereby incorporated by reference in its entirety. Said ASCII copy, created on Feb. 1, 2021, is named GB1-003US_SL.txt and is 1,131,402 bytes in size.

### FIELD OF INVENTION

[0003] This invention relates generally to cancer therapies, and more specifically, to novel compounds comprising anti-DLL3, CLDN18.2 and Muc17 antibodies or immunoreactive fragments thereof for the treatment of cancer.

### BACKGROUND

[0004] Cancer is generally defined as a group of diseases involving abnormal cell growth with the potential to invade or spread to other parts of the body. In 2019, roughly 1.8 million people were diagnosed with cancer in the United States. Each year, an estimated 606,880 people will die from cancer in the United States. Lung and bronchus cancer is responsible for the most deaths. Colorectal cancer and pancreatic cancer are the second and third most common causes of cancer death respectively.

[0005] Cancer has been linked to several factors including smoking, obesity, poor diet, lack of physical activity and excessive consumption of alcohol. Other factors include certain infections, exposure to ionizing radiation and environmental pollutants. Certain cancers have been linked to infections such as Helicobacter pylori, hepatitis B, hepatitis C, human papillomavirus infection, Epstein-Barr virus and human immunodeficiency virus (HIV).

[0006] Conventional cancer treatments are directed at removing cancerous tissue and preventing it from spreading. Such treatment options include surgery, chemotherapy, radiation therapy, hormonal therapy, targeted therapy and palliative care. Treatments are usually pursued based on the type, location and grade of the cancer as well as the patient's health and preferences. These options have limitations. They can be ineffective, particularly when cancer has metastasized. Moreover, chemotherapy and radiation therapy have a range of side-effects related to cell toxicity.

[0007] Because cancer cells divide faster than most normal cells, they can be sensitive to chemotherapy drugs. However, chemotherapy drugs will also attack other cells in the body, especially fast-dividing cells such as blood cells and the cells lining the mouth, stomach, and intestines. Accordingly, there is a need for improved medications and methods of treating cancer that are more targeted and have less deleterious side effects.

[0008] A promising area for the development of treatments includes targeted therapies using antibodies. For example, the use of antibody drug conjugates can be used to target a drug toward a tumor. Immunoconjugates are antibodies conjugated (joined) to a second molecule, usually a toxin, radioisotope or label. Immunoconjugates can provide for relatively high concentrations of drug within the tumor whereas systemic administration of unconjugated (i.e., untargeted) drug to achieve the same tumor concentration can lead to levels that are toxic to normal cells.

[0009] Another promising area is development of treatments that harness the immune system to attack and kill tumor cells. Checkpoint inhibitors, such as anti-CTLA4, anti-PD1 and anti-PDL1 therapies have changed the way cancer is treated. Similarly, the direct activation of cytotoxic T cells by bispecific T cell engagers or CAR-T engineered T cells, has led to previously unseen cures in many types of cancers.

[0010] Delta-like ligand 3 (DLL3) is an inhibitory notch ligand that is expressed at relatively low levels in normal tissues. It is expressed at high levels in small cell lung cancer (SCLC) and other neuroendocrine tumors, thus presenting potential therapeutic target in cancer diagnosis and treatment.

[0011] Mucin 17, also referred to as MUC17, is a member of the mucin family that is composed of more than 20 members. Mucins are large, highly glycosylated membrane bound proteins. They generally function in mucosal areas to protect epithelial cells from their environment, as well as to regulate proliferation and survival of cells. MUC17 is expressed in pancreatic, appendiceal, and some colon cancers and thus is a target antigen for these cancers. Thus, MUC17 is a candidate for targeting of therapies such as antibody drug conjugates, T cell engagers, and CAR-T cells.

[0012] Claudin-18 (CLDN18) is a protein in humans that is encoded by the CLDN18 gene. It belongs to the group of claudins, a family of proteins that form components of tight cell junction strands in epithelial cells. Studies have demonstrated that Isoform 2 (Claudin 18.2 or CLDN18.2) is abundant in gastric tumors. It has exposed extracellular loops and is available for monoclonal antibody binding. These biological characteristics have led to the development of monoclonal antibodies against claudin 18.2, such as claudiximab (IMAB362).

[0013] CD3, CD28 and CD137 are receptors present on T-cells. T cells can be activated though CD3, CD28 and CD137, by antigen-presenting cells that utilize the activation signals MHC Class I and II, CD80 and CD86, and 4-1BBL, respectively. CD3 is part of the T cell receptor (TCR) and is the signaling component for the receptor. There are three CD3 subunits, epsilon, delta and gamma. Epsilon associates with both delta and zeta and together they are responsible for signaling. CD3 signaling is considered signal 1 that is required to activate T cells. The co-receptors, CD28 and CD137, are considered signal 2. Both signal 1 and signal 2 are required for full activation, proliferation and survival of T cells.

[0014] The present invention discloses trispecific T Cell Engagers. The trispecific and trispecific molecules can bind to DLL3, MUC17 and/or CLDN18.2 and activate CD (cluster of differentiation) molecules (e.g. CD3, CD28 and CD137). Also provided are methods of treating an ailment such as cancer using antibodies and antibody conjugates, pharmaceutical compositions thereof, and articles of manufacture.

### SUMMARY

[0015] The inventions described and claimed herein have many attributes and embodiments including, but not limited to, those set forth or described or referenced in this brief summary. The inventions described and claimed herein are not limited to, or by, the features or embodiments identified in this summary, which is included for purposes of illustration only and not restriction.

[0016] An aspect of the invention is an antibody against DLL3. The antibody can be a fragment such as an antigen binding fragment (Fab) or a single chain variable fragment (Scfvs).

[0017] An aspect of the invention is an agonist antibody that activates CD3, CD28 and/or CD137.

[0018] An aspect of the invention is a bispecific or trispecific molecule that includes an antibody (or fragment) against DLL3 paired with an antibody (or fragment) of an agonist antibody that activates CD3, CD28 or CD137.

[0019] An aspect of the invention is a method of treating an ailment such as cancer using an antibody (or fragment) against DLL3 paired with an antibody (or fragment) of an agonist antibody that activates CD3, CD28 or CD137.

[0020] An aspect of the invention is a method of treating an ailment that uses two or more of the triispecific molecules described herein in combination with one another.

[0021] An aspect of the invention is a method of treating an ailment that uses one bispecific and one trispecific molecule described herein in combination with one another.

[0022] An aspect of the invention is a method of treating an ailment that uses two or more trispecific molecules described herein in combination with one another.

[0023] An aspect on the invention is a method of activating T-cell cytotoxicity against DLL3 expressing cells.

[0024] An aspect of the invention is a method of activating T-cell cytotoxicity using a bispecific molecule the includes an antibody (or fragment) against DLL3 paired with an antibody (or fragment) of an agonist antibody that activates CD3, CD28 or CD137.

[0025] An aspect of the invention is a humanized antibody which binds to human DLL3 protein comprising a heavy chain variable domain having at least 95%, at least 96%, at least 97%, at least 98%, at least 99%, or at least 100% sequence identity to SEQ ID NO: 56-74 or 75.

[0026] The disclosed methods can utilize any DLL3 antibody, including for example, an anti-DLL3 antibody comprising three CDRs of a heavy chain variable region amino acid sequence of SEQ ID NO: 1-27 or 29.

[0027] An aspect of the invention is a humanized antibody which binds to human DLL3 protein comprising a light chain variable domain having at least 95%, at least 96%, at least 97%, at least 98%, at least 99%, or at least 100% sequence identity to SEQ ID NO: 76-90 or 91.

[0028] The disclosed methods can utilize any DLL3 antibody, including for example, an anti-DLL3 antibody comprising three CDRs of a light chain variable region amino acid sequence of SEQ ID NO: 32-54 or 55.

[0029] An aspect of the invention is an antibody against MUC17. The antibody can be a fragment such as an antigen binding fragment (Fab) or a single chain variable fragment (Scfv).

[0030] An aspect of the invention is an agonist antibody that activates CD3, CD28 and/or CD137.

[0031] An aspect of the invention is a bispecific or trispecific molecule that includes an antibody (or fragment) against MUC17 paired with an antibody (or fragment) of an agonist antibody that activates CD3, CD28 or CD137.

[0032] An aspect of the invention is a method of treating an ailment such as cancer using an antibody (or fragment) against MUC17 paired with an antibody (or fragment) of an agonist antibody that activates CD3, CD28 or CD137.

[0033] An aspect of the invention is a method of treating an ailment that uses two or more of the bispecific or trispecific molecules described herein in combination with one another.

[0034] An aspect on the invention is a method of activating T-cell cytotoxicity against MUC17 expressing cells.

[0035] An aspect of the invention is a method of activating T-cell cytotoxicity using a bispecific or trispecific molecule the includes an antibody (or fragment) against MUC17 paired with an antibody (or fragment) of an agonist antibody that activates CD3, CD28 or CD137.

[0036] An aspect of the invention is a humanized antibody which binds to human MUC17 protein comprising a heavy chain variable domain having at least 95%, at least 96%, at least 97%, at least 98%, at least 99%, or at least 100% sequence identity to SEQ ID NO: 127-245 or 246.

[0037] The disclosed methods can utilize any MUC17 antibody, including for example, an anti-MUC17 antibody comprising three CDRs of a heavy chain variable region amino acid sequence of SEQ ID NO: 92-111 or 112.

[0038] The disclosed methods can utilize any MUC17 antibody, including for example, an anti-MUC17 antibody comprising three CDRs of a light chain variable region amino acid sequence of SEQ ID NO: 113-125 or 126.

[0039] An aspect of the invention is a humanized antibody which binds to human MUC17 protein comprising a light chain variable domain having at least 95%, at least 96%, at least 97%, at least 98%, at least 99%, or at least 100% sequence identity to SEQ ID NO: 147-168 or 169.

[0040] The disclosed methods can utilize any MUC17 antibody, including for example, an anti-MUC17 antibody comprising three CDRs of a heavy chain variable region amino acid sequence of SEQ ID NO: 92-111 or 112.

[0041] The disclosed methods can utilize any MUC17 antibody, including for example, an anti-MUC17 antibody comprising three CDRs of a light chain variable region amino acid sequence of SEQ ID NO: 113-125 or 126.

[0042] An aspect of the invention is a method of treating an ailment such as cancer using an antibody (or fragment) against CLDN18.2 paired with an antibody (or fragment) of an agonist antibody that activates CD3, CD28 or CD137.

[0043] An aspect on the invention is a method of activating T-cell cytotoxicity against CLDN18.2 expressing cells.

[0044] An aspect of the invention is a method of activating T-cell cytotoxicity using a bispecific or trispecific molecule the includes an antibody (or fragment) against CLDN18.2 paired with an antibody (or fragment) of an agonist antibody that activates CD3, CD28 or CD137.

[0045] An aspect of the invention is a method of activating T-cell cytotoxicity using a trispecific molecule the includes an antibody (or fragment) against CLDN18.2 paired with an antibody (or fragment) of an agonist antibody that activates CD3, CD28 and/or CD137.

[0046] The disclosed methods can utilize any CLDN18.2 antibody, including for example, an anti-CLDN18.2 antibody comprising three CDRs of a heavy chain variable region amino acid sequence of SEQ ID NO: 170-186 or 187.

[0047] An aspect of the invention is a humanized antibody which binds to human CLDN18.2 protein comprising a heavy chain variable domain having at least 95%, at least 96%, at least 97%, at least 98%, at least 99%, or at least 100% sequence identity to SEQ ID NO: 197
[0048] 205 or 206.

[0049] The disclosed methods can utilize any CLDN18.2 antibody, including for example, an anti-CLDN18.2 antibody comprising three CDRs of a light chain variable region amino acid sequence of SEQ ID NO: 188-195 or 196.

[0050] An aspect of the invention is a humanized antibody which binds to human CLDN18.2 protein comprising a light chain variable domain having at least 95%, at least 96%, at least 97%, at least 98%, at least 99%, or at least 100% sequence identity to SEQ ID NO: 207-212 or 213.

[0051] The disclosed methods can utilize any CLDN18.2 antibody, including for example, an anti-CLDN18.2 antibody comprising three CDRs of a heavy chain variable region amino acid sequence of SEQ ID NO: 170-186 or 187.

[0052] The disclosed methods can utilize any CLDN18.2 antibody, including for example, an anti-CLDN18.2 antibody comprising three CDRs of a light chain variable region amino acid sequence of SEQ ID NO: 188-195 or 196.

[0053] Another aspect of the invention is a method of activating T-cell cytotoxicity using a triispecific molecule the includes more than one antibodies (or fragments) against DLL3, MUC17 and/or CLDN18.2 paired with one or more antibodies (or fragments) of an agonist antibodies that activate one or more of CD3, CD28 or CD137.

[0054] Another aspect of the invention is a trispecific molecule that includes (a) an anti-DLL3 antibody, an anti-Muc17 antibody or an anti-Cldn18.2 antibody, (b) a first antigen binding entity and (c) a second antigen binding entity. In one embodiment, the first antigen binding entity is comprised of an anti-CD28 scFv domain and the second antigen binding entity is comprised of an anti-CD3 Scfv-Fc domain. The first antigen binding entity and the second antigen binding entity form a heterodimer configuration. In one embodiment, the trispecific molecule includes a first chain of SEQ. ID NO: 347, a second chain of SEQ. ID NO: 276 and a third chain of SEQ. ID NO: 297. In another embodiment, the trispecific molecule includes a first chain of SEQ. ID NO: 430, a second chain of SEQ. ID NO: 276 and a third chain of SEQ. ID NO: 297. Alternatively, the trispecific molecule can include a first chain of SEQ. ID NO: 481, a second chain of SEQ. ID NO: 406 and a third chain of SEQ. ID NO: 413.

[0055] In some embodiments, the targeting domains are linked to one another by peptide bonds via peptide linkers or through covalent conjugates using appropriate crosslinking technologies known in the art.

[0056] In some embodiments, the targeting domains comprise antibody variable regions. In some embodiments, the targeting domains are in the form of a single domain antibody (sdAb), a fragment variable (Fv) heterodimer, a single chain Fv (scFv), a Fab fragment, a TriFab, or a combination thereof.

[0057] In some embodiments, the trispecific molecules are administered with a checkpoint inhibitor.

[0058] In some embodiments, the trispecific molecules are administered with an anti-PD1 and/or anti-PDL1 antagonists.

[0059] Other features and advantages of aspects of the present invention will become apparent from the following more detailed description, taken in conjunction with the accompanying drawings, which illustrate, by way of example, the principles of aspects of the invention.

### BRIEF DESCRIPTION OF THE DRAWINGS

[0060] The accompanying drawings illustrate aspects of the present invention. In such drawings:

[0061] FIG. 1A to 1R depict Scfv-scfv-Fc×Fab-Fc formats for the trispecific molecules of the invention.

[0062] FIG. 1A depicts an anti-CD3, anti-DLL3, anti-CD28 (scfv-scfv-Fc×Fab-Fc) molecule.

[0063] FIG. 1B depicts an anti-CD3, anti-DLL3, anti-CD137 (scfv-scfv-Fc×Fab-Fc) molecule.

[0064] FIG. 1C depicts an anti-CD28, anti-DLL3, anti-CD137 (scfv-scfv-Fc×Fab-Fc) molecule.

[0065] FIG. 1D depicts an anti-CD28, anti-DLL3, anti-CD3 (scfv-scfv-Fc×Fab-Fc) molecule.

[0066] FIG. 1E depicts an anti-CD137, anti-DLL3, anti-CD3 (scfv-scfv-Fc×Fab-Fc) molecule.

[0067] FIG. 1F depicts an anti-CD137, anti-DLL3, anti-CD28 (scfv-scfv-Fc×Fab-Fc) molecule.

[0068] FIG. 1G depicts an anti-DLL3, anti-CD3, anti-CD28 (scfv-scfv-Fc×Fab-Fc) molecule.

[0069] FIG. 1H depicts an anti-DLL3, anti-CD3, anti-CD137 (scfv-scfv-Fc×Fab-Fc) molecule.

[0070] FIG. 1I depicts an anti-DLL3, anti-CD28, anti-CD137 (scfv-scfv-Fc×Fab-Fc) molecule.

[0071] FIG. 1J depicts an anti-DLL3, anti-CD28, anti-CD3 (scfv-scfv-Fc×Fab-Fc) molecule.

[0072] FIG. 1K depicts an anti-DLL3, anti-CD137, anti-CD3 (scfv-scfv-Fc×Fab-Fc) molecule.

[0073] FIG. 1L depicts an anti-DLL3, anti-CD137, anti-CD28 (scfv-scfv-Fc×Fab-Fc) molecule.

[0074] FIG. 1M depicts an anti-CD28, anti-CD3, anti-DLL3 (scfv-scfv-Fc×Fab-Fc) molecule.

[0075] FIG. 1N depicts an anti-CD137, anti-CD3, anti-DLL3 (scfv-scfv-Fc×Fab-Fc) molecule.

[0076] FIG. 1O depicts an anti-CD137, anti-CD28, anti-DLL3 (scfv-scfv-Fc×Fab-Fc) molecule.

[0077] FIG. 1P depicts an anti-CD3, anti-CD28, anti-DLL3 (scfv-scfv-Fc×Fab-Fc) molecule.

[0078] FIG. 1Q depicts an anti-CD3, anti-CD137, anti-DLL3 (scfv-scfv-Fc×Fab-Fc) molecule.

[0079] FIG. 1R depicts an anti-CD28, anti-CD137, anti-DLL3 (scfv-scfv-Fc×Fab-Fc)

[0080] FIG. 2A is a graph that demonstrates the binding of anti-DLL3 antibodies to human DLL3 expressing CHO cells.

[0081] FIG. 2B is a graph that demonstrates the binding of anti-DLL3 antibodies to CHO cells expressing cynomulgus DLL3.

[0082] FIG. 3 is a graph that demonstrates the binding of anti-DLL3 scfv-Fc to human DLL3 expressing CHO cells.

[0083] FIG. 4 is a graph that demonstrates CD28scfv-CD3scFv-Fc×DLL3-Fab-Fc trispecific molecule 328D3 activates PBMCs to secrete IFN gamma in the presence of CHO-DLL3 cells to higher levels than the CD3scfv-Fc×DLL3Fab-Fc bispecific molecule 3D1I or CD28scfv-Fc×DLL3Fab-Fc bispecific molecule 28D18.

[0084] FIG. 5 is a graph that demonstrates CD28scfv-CD3scFv-Fc×DLL3-Fab-Fc trispecific molecule 328D2 activates PBMCs to secrete IFNgamma in the presence of CHO-DLL3 cells to higher levels than the CD3scfv-Fc×DLL3Fab-Fc bispecific molecule 3D41 or CD28scfv-Fc×DLL3Fab-Fc bispecific molecule 28D15.

[0085] FIG. 6 is a graph that demonstrates CD28scfv-CD3scFv-Fc×DLL3-Fab-Fc trispecific molecule 328D1 activates PBMCs to secrete IFNgamma in the presence of CHO-DLL3 cells to higher levels than the CD3scfv-Fc×DLL3Fab-Fc bispecific molecule 3D22I or CD28scfv-Fc×DLL3Fab-Fc bispecific molecule 28D17

[0086] FIG. 7 is a graph that demonstrates CD28scfv-CD3scFv-Fc×DLL3-Fab-Fc trispecific molecules 328D4 and 328D5 activate PBMCs to secrete more IL-2 in the presence of NCI-H82 cells greater than the CD3scfv-Fc×DLL3Fab-Fc bispecific, 3D39I.

[0087] FIG. 8A-8C depict bispecific and trispecific molecules with two CD137 Fab fragments.

[0088] FIG. 8A depicts a bispecific molecule of anti-CD137, anti-DLL3, anti-DLL3 (scfv-scfv-Fc×Fab-Fc) molecule.

[0089] FIG. 8B depicts an anti-CD137, anti-DLL3, anti-CD3 (scfv-scfv-Fc×Fab-Fc) molecule.

[0090] FIG. 8C depicts an anti-CD137, anti-DLL3, anti-CD3 (scfv-scfv-Fc×Fab-Fc) molecule.

[0091] FIG. 9A-9F depict bispecific molecules and trispecific molecules with two CD137 scfv fragments.

[0092] FIG. 9A depicts an anti-DLL3, anti-CD3, anti-CD137, anti-CD137 (scfv-scfv-Fc×Fc-Scfv) molecule.

[0093] FIG. 9B depicts an anti-DLL3, anti-CD3, anti-CD137, anti-CD137 (scfv-scfv-Fc×Scfv-Fc-Scfv) molecule.

[0094] FIG. 9C depicts an anti-CD137, anti-CD137, anti-DLL3 (scfv-scfv-Fc×Fab-Fc) molecule.

[0095] FIG. 9D depicts an anti-DLL3, anti-CD137, anti-CD137 (scfv-scfv-Fc×Fab-Fc) molecule.

[0096] FIG. 9E depicts an anti-DLL3, anti-CD3, anti-CD137 (Fab-Fc-Scfv×Scfv-Fc-Scfv) molecule.

[0097] FIG. 9F depicts an anti-DLL3, anti-CD3, anti-CD137, anti-CD137 (Fab-Fc-Scfv-Scfv×Scfv-Fc) molecule.

[0098] FIG. 10A to 10R depict Scfv-scfv-Fc×Fab-Fc formats for the trispecific molecules of the invention.

[0099] FIG. 10A depicts an anti-CD3, anti-MUC17, anti-CD28 (scfv-scfv-Fc×Fab-Fc) molecule.

[0100] FIG. 10B depicts an anti-CD3, anti-MUC17, anti-CD137 (scfv-scfv-Fc×Fab-Fc) molecule.

[0101] FIG. 10C depicts an anti-CD28, anti-MUC17, anti-CD137 (scfv-scfv-Fc×Fab-Fc) molecule.

[0102] FIG. 10D depicts an anti-CD28, anti-MUC17, anti-CD3 (scfv-scfv-Fc×Fab-Fc) molecule.

[0103] FIG. 10E depicts an anti-CD137, anti-MUC17, anti-CD3 (scfv-scfv-Fc×Fab-Fc) molecule.

[0104] FIG. 10F depicts an anti-CD137, anti-MUC17, anti-CD28 (scfv-scfv-Fc×Fab-Fc) molecule.

[0105] FIG. 10G depicts an anti-MUC17, anti-CD3, anti-CD28 (scfv-scfv-Fc×Fab-Fc) molecule.

[0106] FIG. 10H depicts an anti-MUC17, anti-CD3, anti-CD137 (scfv-scfv-Fc×Fab-Fc) molecule.

[0107] FIG. 10I depicts an anti-MUC17, anti-CD28, anti-CD137 (scfv-scfv-Fc×Fab-Fc) molecule.

[0108] FIG. 10J depicts an anti-MUC17, anti-CD28, anti-CD3 (scfv-scfv-Fc×Fab-Fc) molecule.

[0109] FIG. 10K depicts an anti-MUC17, anti-CD137, anti-CD3 (scfv-scfv-Fc×Fab-Fc) molecule.

[0110] FIG. 10L depicts an anti-MUC17, anti-CD137, anti-CD28 (scfv-scfv-Fc×Fab-Fc) molecule.

[0111] FIG. 10M depicts an anti-CD28, anti-CD3, anti-MUC17 (scfv-scfv-Fc×Fab-Fc) molecule.

[0112] FIG. 10N depicts an anti-CD137, anti-CD3, anti-MUC17 (scfv-scfv-Fc×Fab-Fc) molecule.

[0113] FIG. 10O depicts an anti-CD137, anti-CD28, anti-MUC17 (scfv-scfv-Fc×Fab-Fc) molecule.

[0114] FIG. 10P depicts an anti-CD3, anti-CD28, anti-MUC17 (scfv-scfv-Fc×Fab-Fc) molecule.

[0115] FIG. 10Q depicts an anti-CD3, anti-CD137, anti-MUC17 (scfv-scfv-Fc×Fab-Fc) molecule.

[0116] FIG. 10R depicts an anti-CD28, anti-CD137, anti-MUC17 (scfv-scfv-Fc×Fab-Fc) molecule.

[0117] FIG. 11A is a graph that demonstrates MUC17×CD3 Bispecifics bind CHOK1 cells expressing MUC17.

[0118] FIG. 11B is a graph that demonstrates MUC17×CD3 Bispecifics bind to ASPC1 tumor cells.

[0119] FIG. 12 graph showing hu1MU11A and hu1MU32A retain Muc17 binding activity in the Scfv format.

[0120] FIG. 13 is a graph that demonstrates CD3×CD28×Muc17 trispecific molecules have similar maximum killing of ASPC1 cells by PBMCs as the CD3 bispecific 3M62I.

[0121] FIG. 14 is a graph that demonstrates Muc17×CD3×cD28 Trispecific molecules 328M2, 328M 3, 328M4, and 328M5 activate PBMCs in the presence of ASPC1 cells to secrete IL-2 at levels higher than that of the CD3 bispecific, 3M62I.

[0122] FIG. 15 is a graph that demonstrates CD3Scfv×CD28-scFv×Muc17Fab trispecifc molecules 328M1 and 328M2 activate T-cells to kill MUC17-CHO cells better than the CD3 bispecific 3M55I, and similar to the combination of CD3 and CD28 bispecifics, 3M55I+28M3.

[0123] FIG. 16A-16B are graphs that demonstrate CD28scfv×CD3scfv×Muc17Fab trispecific 328M2 activates PBMCs to express CD25 only when in the presence of Muc17 expressing CHO cells and cannot activate without Muc17 target cells. In contrast the CD3scFv×CD28scFv×Muc17-Fab trispecific 328M1 is able to non-specifically activate cells in the absence of Muc17, similarly to the bispecific lacking Muc17 binding, 328-1.

[0124] FIG. 16A shows the expression of CD25(MFI) stimulated by increasing concentrations of the bispecific and trispecific molecules T cells when PBMCs are in the presence of MUC17 expressing CHO cells. FIG. 16B shows the expression of CD25(MFI) stimulated by increasing concentrations of the bispecific and trispecific molecules T cells when PBMCs are in the presence of parental CHO cells

[0125] FIGS. 17A and 17B are graphs that demonstrates CD137×CD3×Muc17 trispecific molecules 34M1 and 34M4 increase CD4 and CD8 T cell numbers when PBMCs are cultured with Muc17 expressing CHO cells to a greater level than the benchmark CD3 bispecific 3M8B7.

[0126] FIG. 18A-18D depict Muc17×CD137 and DLL3×CD137 bispecific molecules.

[0127] FIG. 19A-19C depict MUC17 bispecifi and trispecific molecules with two CD137 Fab fragments.

[0128] FIG. 19A depicts an anti-CD137, anti-MUC17, anti-MUC17 (Fab-Fc-Scfv) molecule.

[0129] FIG. 19B depicts an anti-CD137, anti-MUC17, anti-CD3 (Fab-Fc-Scfv×Fab-Fc-Scfv) molecule.

[0130] FIG. 19C depicts an anti-CD137, anti-MUC17, anti-CD3 (Fab-Fc×Fc-Scfv-Scfv) molecule.

[0131] FIG. 19E-9J depict bispecific molecules and trispecific molecules with two anti-CD137 fragments.

[0132] FIG. 19E depicts an anti-CD137, anti-CD137, anti-MUC17, (scfv-scfv-Fc×Fab-Fc) molecule.

[0133] FIG. 19F depicts an anti-MUC17, anti-CD137, anti-CD137 (scfv-scfv-Fc×Fab-Fc) molecule.

[0134] FIG. 19G depicts an anti-MUC17, anti-CD137, anti-CD3, anti-CD137 (Fab-Fc-Scfv×Scfv-Fc-Scfv) molecule.

[0135] FIG. 19H depicts an anti-MUC17, anti-CD137, anti-CD137, anti-CD3 (Fab-Fc-Scfv-Scfv×Scfv-Fc) molecule.

[0136] FIG. 19I depicts an anti-MUC17, anti-CD3, anti-CD137, anti-CD137 (scfv-scfv-Fc-Scfv×Fc-Scfv) molecule.

[0137] FIG. 19J depicts an anti-DLL3, anti-CD3, anti-CD137, anti-MUC17, anti-CD137 (scfv-scfv-Fc×Scfv-Fc-Scfv) molecule.

[0138] FIG. 20A to 20R depict Scfv-scfv-Fc×Fab-Fc formats for the trispecific molecules of the invention.

[0139] FIG. 20A depicts an anti-CD3, anti-CLDN18.2, anti-CD28 (scfv-scfv-Fc×Fab-Fc) molecule.

[0140] FIG. 20B depicts an anti-CD3, anti-CLDN18.2, anti-CD137 (scfv-scfv-Fc×Fab-Fc) molecule.

[0141] FIG. 20C depicts an anti-CD28, anti-CLDN18.2, anti-CD137 (scfv-scfv-Fc×Fab-Fc) molecule.

[0142] FIG. 20D depicts an anti-CD28, anti-CLDN18.2, anti-CD3 (scfv-scfv-Fc×Fab-Fc) molecule.

[0143] FIG. 20E depicts an anti-CD137, anti-CLDN18.2, anti-CD3 (scfv-scfv-Fc×Fab-Fc) molecule.

[0144] FIG. 20F depicts an anti-CD137, anti-CLDN18.2, anti-CD28 (scfv-scfv-Fc×Fab-Fc) molecule.

[0145] FIG. 20G depicts an anti-CLDN18.2, anti-CD3, anti-CD28 (scfv-scfv-Fc×Fab-Fc) molecule.

[0146] FIG. 20H depicts an anti-CLDN18.2, anti-CD3, anti-CD137 (scfv-scfv-Fc×Fab-Fc) molecule.

[0147] FIG. 20I depicts an anti-CLDN18.2, anti-CD28, anti-CD137 (scfv-scfv-Fc×Fab-Fc) molecule.

[0148] FIG. 20J depicts an anti-CLDN18.2, anti-CD28, anti-CD3 (scfv-scfv-Fc×Fab-Fc) molecule.

[0149] FIG. 20K depicts an anti-CLDN18.2, anti-CD137, anti-CD3 (scfv-scfv-Fc×Fab-Fc) molecule.

[0150] FIG. 20L depicts an anti-CLDN18.2, anti-CD137, anti-CD28 (scfv-scfv-Fc×Fab-Fc) molecule.

[0151] FIG. 20M depicts an anti-CD28, anti-CD3, anti-CLDN18.2 (scfv-scfv-Fc×Fab-Fc) molecule.

[0152] FIG. 20N depicts an anti-CD137, anti-CD3, anti-CLDN18.2 (scfv-scfv-Fc×Fab-Fc) molecule.

[0153] FIG. 20O depicts an anti-CD137, anti-CD28, anti-CLDN18.2 (scfv-scfv-Fc×Fab-Fc) molecule.

[0154] FIG. 20P depicts an anti-CD3, anti-CD28, anti-CLDN18.2 (scfv-scfv-Fc×Fab-Fc) molecule.

[0155] FIG. 20Q depicts an anti-CD3, anti-CD137, anti-CLDN18.2 (scfv-scfv-Fc×Fab-Fc) molecule.

[0156] FIG. 20R depicts an anti-CD28, anti-CD137, anti-CLDN18.2 (scfv-scfv-Fc×Fab-Fc) molecule.

[0157] FIG. 21 is a graph that demonstrates trispecific molecules 328C1, 328C 2, 328C3, 328C4 activate T-cells to secrete IL-2 better to a greater level than the 3C27I CD3×CLDN18.2 bispecific alone.

[0158] FIG. 22 is a graph that demonstrates CD3×CD137×CLDN18.2 trispecific molecules 34C4 and 34C3 activate PBMCs in the presence of SNU-601 cells to express more CD25 than bispecific 3C18I.

[0159] FIG. 23 is a graph that demonstrates CD3×CD137×CLDN18.2 trispecific molecules 34C4 and 34C3 activate PBMCs in the presence of SNU-601 cells to secrete more IFNgamma than bispecific 3C18I alone.

[0160] FIG. 24 is a graph that demonstrates CD3×CD137×CLDN18.2 trispecific 34C3 increases CD8 T cell numbers beyond what is stimulated by the CD3 T cell engager 3C27I in the presence of CHO cells expressing CLDN18.2.

[0161] FIG. 25A-25C depict CLDN18.2 bispecific and trispecific molecules with two CD137 Fab or Scfv fragments.

[0162] FIG. 25A depicts an anti-CD137, anti-CLDN18.2, anti-CLDN (scfv-scfv-Fc×Fab-Fc) molecule.

[0163] FIG. 25B depicts an anti-CD137, anti-CLDN18.2, anti-CD3 trispecific molecule (Fab-Fc-Scfv×Fab-Fc-Scfv) molecule.

[0164] FIG. 25C depicts an anti-CD137, anti-CLDN18.2, anti-CD3 trispecific molecule (Fab-Fc-Scfv-Scfv×Fab-Fc)

[0165] FIG. 25D depicts an anti-CD137, anti-CD137, anti-CLDN18.2 biispecific molecule (Scfv-Scfv-Fc×Fab-Fc)

[0166] FIG. 25E depicts an anti-CLDN18.2, anti-CD137, anti-CD137, trispecific molecule (Scfv-Scfv-Fc×Fab-Fc)

[0167] FIG. 25F depicts an anti-CLDN18.2, anti-CD137, anti-CD3, anti-CD137 18.2(Fab-Fc-Scfv×Scfv-Fc-Scfv) molecule.

[0168] FIG. 25G depicts an anti-CLDN18.2, anti-CD3, anti-CD137, anti-CD137 (Fab-Fc-Scfv-Scfv×Scfv-Fc) molecule.

[0169] FIG. 25H depicts an anti-CLDN18.2, anti-CD3, anti-CD137, anti-CD137 (scfv-scfv-Fc-Scfv×Fc-Scfv) molecule.

[0170] FIG. 25I depicts an anti-CLDN18.2, anti-CD3, anti-CD137, anti-CD137 (scfv-scfv-Fc×Scfv-Fc-Scfv) molecule.

### DEFINITIONS

[0171] Reference in this specification to “one embodiment/aspect” or “an embodiment/aspect” means that a particular feature, structure, or characteristic described in connection with the embodiment/aspect is included in at least one embodiment/aspect of the disclosure. The use of the phrase “in one embodiment/aspect” or “in another embodiment/aspect” in various places in the specification are not necessarily all referring to the same embodiment/aspect, nor are separate or alternative embodiments/aspects mutually exclusive of other embodiments/aspects. Moreover, various features are described which may be exhibited by some embodiments/aspects and not by others. Similarly, various requirements are described which may be requirements for some embodiments/aspects but not other embodiments/aspects. Embodiment and aspect can in certain instances be used interchangeably.

[0172] The terms used in this specification generally have their ordinary meanings in the art, within the context of the disclosure, and in the specific context where each term is used. Certain terms that are used to describe the disclosure are discussed below, or elsewhere in the specification, to provide additional guidance to the practitioner regarding the description of the disclosure. It will be appreciated that the same thing can be said in more than one way.

[0173] Consequently, alternative language and synonyms may be used for any one or more of the terms discussed herein. Nor is any special significance to be placed upon whether or not a term is elaborated or discussed herein. Synonyms for certain terms are provided. A recital of one or more synonyms does not exclude the use of other synonyms. The use of examples anywhere in this specification including examples of any terms discussed herein is illustrative only, and is not intended to further limit the scope and meaning of the disclosure or of any exemplified term. Likewise, the disclosure is not limited to various embodiments given in this specification.

[0174] Without intent to further limit the scope of the disclosure, examples of instruments, apparatus, methods and their related results according to the embodiments of the present disclosure are given below. Note that titles or subtitles may be used in the examples for convenience of a reader, which in no way should limit the scope of the disclosure. Unless otherwise defined, all technical and scientific terms used herein have the same meaning as commonly understood by one of ordinary skill in the art to which this disclosure pertains. In the case of conflict, the present document, including definitions, will control.

[0175] As applicable, the terms “about” or “generally”, as used herein in the specification and appended claims, and unless otherwise indicated, means a margin of +/−20%. Also, as applicable, the term “substantially” as used herein in the specification and appended claims, unless otherwise indicated, means a margin of +/−10%. It is to be appreciated that not all uses of the above terms are quantifiable such that the referenced ranges can be applied.

[0176] The term “subject” or “patient” refers to any single animal, more preferably a mammal (including such non-human animals as, for example, dogs, cats, horses, rabbits, zoo animals, cows, pigs, sheep, and non-human primates) for which treatment is desired. Most preferably, the patient herein is a human. In an embodiment, a “subject” of diagnosis or treatment is a prokaryotic or a eukaryotic cell, a tissue culture, a tissue or an animal, e.g. a mammal, including a human.

[0177] As used herein, the term “comprising” is intended to mean that the compositions and methods include the listed elements, but do not exclude other unlisted elements. “Consisting essentially of” when used to define compositions and methods, excludes other elements that alters the basic nature of the composition and/or method, but does not exclude other unlisted elements. Thus, a composition consisting essentially of the elements as defined herein would not exclude trace amounts of elements, such as contaminants from any isolation and purification methods or pharmaceutically acceptable carriers, such as phosphate buffered saline, preservatives, and the like, but would exclude additional unspecified amino acids. “Consisting of” excludes more than trace elements of other ingredients and substantial method steps for administering the compositions described herein. Embodiments defined by each of these transition terms are within the scope of this disclosure and the inventions embodied therein.

[0178] The term “tri-specific monoclonal antibody” or “TSMAb” refers to an antibody that can simultaneously engage three different types of epitopes.

[0179] The term “active agent” or “active ingredient” refers to a substance, compound, or molecule, which is biologically active or otherwise, induces a biological or physiological effect on a subject to which it is administered to. In other words, “active agent” or “active ingredient” refers to a component or components of a composition to which the whole or part of the effect of the composition is attributed. An active agent can be a primary active agent, or in other words, the component(s) of a composition to which the whole or part of the effect of the composition is attributed. An active agent can be a secondary agent, or in other words, the component(s) of a composition to which an additional part and/or other effect of the composition is attributed.

[0180] In an embodiment, a “pharmaceutical composition” is intended to include the combination of an active agent, such as an anti-DLL3, anti-MUC17 or anti-CLDN18.2 antibody and antibody conjugates, with a carrier, inert or active, in a sterile composition suitable for diagnostic or therapeutic use in vitro, in vivo or ex vivo. In one aspect, the pharmaceutical composition is substantially free of endotoxins or is non-toxic to recipients at the dosage or concentration employed.

[0181] In an embodiment, “an effective amount” refers, without limitation, to the amount of the defined component sufficient to achieve the desired therapeutic result. In an embodiment, that result can be effective cancer treatment.

[0182] In an embodiment, as used herein, the terms “treating,” “treatment” and the like are used herein, without limitation, to mean obtaining a desired pharmacologic and/or physiologic effect. The effect may be prophylactic in terms of completely or partially preventing a disorder or sign or symptom thereof, and/or may be therapeutic in terms of amelioration of the symptoms of the disease or infection, or a partial or complete cure for a disorder and/or adverse effect attributable to the disorder.

[0183] As used herein, the term “recombinant” refers to polypeptides or polynucleotides that do not exist naturally and which may be created by combining polynucleotides or polypeptides in arrangements that would not normally occur together. The term can refer to a polypeptide produced through a biological host, selected from a mammalian expression system, an insect cell expression system, a yeast expression system, and a bacterial expression system.

[0184] The term “Delta-like 3” or “DLL3” refers to a protein which in humans is encoded by the DLL3 gene. Mutations in the gene cause the autosomal recessive genetic disorder Jarcho-Levin syndrome. DLL3 is expressed normally on the inside of cells and at low levels on normal tissues. However, lung tumor cells overexpress the gene and cell surface DLL3 levels are increased.

[0185] The term “Mucin 17” or “MUC17” refers to a member of the mucin family that includes more than 20 members. Mucins are large, highly glycosylated membrane bound proteins. They are expressed almost exclusively in the intestine. Their general function is to protect epithelial cells from their environment, as well as to regulate proliferation and survival of cells. MUC17 is highly expressed in pancreatic adenocarcinoma tissue (at protein level). MUC17 is expressed in pancreatic, appendiceal, and some colon cancers. Its expression is not detectable in normal pancreas, in pancreatitis or in cell lines derived from other cancers.

[0186] The term “Claudin-18” or “CLD 18” refers to a protein that in humans is encoded by the CLDN18 gene. CLDN18 belongs to the large claudin family of proteins, which form tight junction strands in epithelial cells. “Claudin 18.2” or “CLDN18.2” denotes isoform 2 which is abundant in tumors, particularly those of the gastric system.

[0187] The term “CD” or “cluster of differentiation molecules” refers to cell surface markers that are useful for the identification and characterization of leukocytes such as CD3, CD28 and CD137. CD3 is the signaling component of the T cell receptor (TCR) complex. Because CD3 is required for T cell activation, drugs (often monoclonal antibodies) that target it are being investigated as immunostimulants for the treatment of cancer.

[0188] CD28 is the major costimulatory molecule required in the generation of T cell-mediated immune responses. Upon interaction with its ligands CD80 and CD86, CD28 transduces activation signals that lead to the expression of anti-apoptotic proteins and enhance the synthesis of several cytokines including IL-2. CD28 costimulatory receptor is present on all T-cells. Agonist antibodies directed against CD28 have led to severe adverse events in the clinic, in contrast to antibodies directed against the other CD28 family members CTLA-4, PD-1, or their B7 ligands, which function as checkpoint inhibitors to overcome tumor immune tolerance and can be used in cancer immunotherapy.

[0189] CD137 is a member of the tumor necrosis factor (TNF) receptor family. Its alternative names are tumor necrosis factor receptor superfamily member 9 (TNFαSF9), 4-1BB and induced lymphocyte activation. Agonistic anti-CD137 antibody acts as an activating costimulatory molecule especially important for effector/memory T cells and promotes the survival and proliferation of T lymphocytes. For example, BBK-4, Urelumab and Utomilumab (PF-05082566) targets this receptor to stimulate a more intense immune system attack on cancers.

[0190] PD-1 (Programmed cell death protein 1 or CD279) is a protein on the surface of cells that has a role in regulating the immune system's response to the cells of the human body by down-regulating the immune system and promoting self-tolerance by suppressing T cell inflammatory activity. Engagement of PD-1 by either of its ligands, PD-L1 or PD-L2, on an adjacent cell inhibits TCR signaling and TCR-mediated proliferation, transcriptional activation and cytokine production. This prevents autoimmune diseases, but it can also prevent the immune system from killing cancer cells. Therapeutic antibodies designed to block the PD-1/PD-L1 interaction have potential for the treatment of cancer.

[0191] Programmed death-ligand 1 (PD-L1) also known as cluster of differentiation 274 (CD274) or B7 homolog 1 (B7-H1) is a protein that in humans is encoded by the CD274 gene. PD-L1 binds to its receptor, PD-1, found on activated T cells, B cells, and myeloid cells, to modulate activation or inhibition.

[0192] As used herein, the term “antibody” refers to a polypeptide or a polypeptide complex that specifically recognizes and binds to an antigen through one or more immunoglobulin variable regions. The recognized immunoglobulin genes include the kappa, lambda, alpha, gamma, delta, epsilon, and mu constant region genes, as well as the myriad immunoglobulin variable region genes. Light chains are classified as either kappa or lambda. Heavy chains are classified as gamma, mu, alpha, delta, or epsilon, which in turn define the immunoglobulin classes, IgG, IgM, IgA, IgD and IgE, respectively. Typically, the antigen-binding region of an antibody will be most critical in specificity and affinity of binding and is encoded by the variable domain. An antibody can be a whole antibody, an antigen binding fragment or a single chain thereof.

[0193] An exemplary immunoglobulin (antibody) structural unit comprises a tetramer. Each tetramer is composed of two identical pairs of polypeptide chains, each pair having one “light” (about 25 kD) and one “heavy” chain (about 50-70 kD). The N-terminus of each chain defines a variable region of about 100 to 110 or more amino acids primarily responsible for antigen recognition. The terms variable light chain (VL) and variable heavy chain (VH) refer to variable domains of the light and heavy chain respectively.

[0194] Antibodies exist, e.g., as intact immunoglobulins or as a number of well-characterized fragments produced by digestion with various peptidases. Thus, for example, pepsin digests an antibody below the disulfide linkages in the hinge region to produce F(ab)′₂, a dimer of Fab which itself is a light chain VL-CL joined to VH-CH1 by a disulfide bond. While various antibody fragments are defined in terms of the digestion of an intact antibody, one of skill will appreciate that such fragments may be synthesized de novo either chemically or by using recombinant DNA methodology. Thus, the term antibody, as used herein, also includes antibody fragments either produced by the modification of whole antibodies, or those synthesized de novo using recombinant DNA methodologies (e.g., single chain Fv) or those identified using phage display libraries (see, e.g., McCafferty et al., Nature 348:552-554 (1990)).

[0195] Accordingly, in either aspect of the invention, the term antibody also embraces minibodies, scFvs, diabodies, triabodies and the like. ScFvs and Diabodies are small bivalent biospecific antibody fragments with high avidity and specificity. Their high signal to noise ratio is typically better due to a better specificity and fast blood clearance increasing their potential for diagnostic and therapeutic targeting of specific antigen (Sundaresan et al., J Nucl Med 44:1962-9 (2003). In addition, these antibodies are advantageous because they can be engineered if necessary as different types of antibody fragments ranging from a small single chain Fv (scFv) to an intact IgG with varying isoforms (Wu & Senter, Nat. Biotechnol. 23:1137-1146 (2005)). In some embodiments, the antibody fragment is part of a scFv-scFv or diabody. In some embodiments, in either aspect, the invention provides high avidity antibodies for use according to the invention.

[0196] The term “agonist antibody” refers to an antibody that stimulates or activates an organ. An antibody can act as an agonist of a receptor, essentially replacing the activity of the normal ligand. The agonist activity can occur when the antibody binds the receptor in a manner that mimics the binding of the physiological ligand resulting in antibody-mediated agonism. For example, agonistic antibodies against the thyrotropin receptor in Grave's disease stimulate the thyroid gland to release thyroid hormones that produce hyperthyroidism. Agonistic antibodies may also stimulate when clustered, either via the Fc portion of the antibody engaging an Fc receptor in trans or cis, or through antigen mediated clustering. The latter clustering mechanism requires antigen engagement by one half of a bispecific or trispecific molecule and engagement of the stimulatory receptor by the second half of a bispecific or trispecific molecule. Exemplary stimulatory receptors are CD3, CD28 and 4-1BB, which stimulate T cells.

[0197] The terms “antibody fragment” or “antigen-binding fragment” are used with reference to a portion of an antibody, such as Fab′, Fab, Fv, scFv and the like. Regardless of structure, an antibody fragment binds with the same antigen that is recognized by the intact antibody. The term “antibody fragment” also includes diabodies and any synthetic or genetically engineered proteins comprising immunoglobulin variable regions that act like an antibody by binding to a specific antigen to form a complex.

[0198] The term “antigen-binding fragment” or “Fab” refers to a region on an antibody that binds to antigens. It includes one constant and one variable domain of each of the heavy and the light chain (i.e. four domains: VH, CH1, VL and CL1.). The variable domain contains the paratope (the antigen-binding site), that includes a set of complementary determining regions at the amino terminal end of the monomer. Each arm of the Y thus binds an epitope on the antigen.

[0199] The term “Fc region” or “fragment crystallizable region” refers to the tail region of an antibody CH2-CH3 that interacts with cell surface receptors called Fc receptors and some proteins of the complement system. This “effector function” allows antibodies to activate the immune system leading to cellular cytotoxicity (ADCC), antibody-dependent cellular phagocytosis (ADCP), and/or complement dependent cytotoxicity (CDC). ADCC and ADCP are mediated through the binding of the Fc to Fc receptors on the surface of cells of the immune system. CDC is mediated through the binding of the Fc with proteins of the complement system, (e.g. C1q).

[0200] In IgG, IgA and IgD antibody isotypes, the Fc region has two identical protein fragments, derived from the second and third constant domains of the antibody's two heavy chains. IgM and IgE Fc regions have three heavy chain constant domains (CH domains 2-4) in each polypeptide chain whereas IgG is composed of 2 CH domains, 2 and 3. The Fc regions of IgGs bear a highly conserved N-glycosylation site. Glycosylation of the Fc fragment is essential for Fc receptor-mediated activity. The N-glycans attached to this site are predominantly core-fucosylated diantennary structures of the complex type. In addition, small amounts of these N-glycans also bear bisecting GlcNAc and α-2, 6 linked sialic acid residues.

[0201] A particular IgG subclass can be preferred for a particular use. For example, IgG1 is more effective than IgG2 and IgG4 at mediating ADCC and CDC. Thus, IgG2 Fc can be preferred when effector function is undesirable. However, IgG2 Fc-containing molecules are generally more difficult to manufacture and can be less stable than IgG1 Fc-containing molecules. Further, the effector function of an antibody can be increased, or decreased, by introducing one or more mutations into the Fc (see, for example, Strohl, Curr. Opin. Biotech., 20:685-691, 2009). Exemplary IgG1 Fc molecules having increased effector function include those having the following substitutions:
[0202] S239D/I332E, S239D/A330S/1332E, S239D/A330L/1332E, S298A/D333A/K334A, P2471/A339D, P2471/A339Q, D280H/K290S, D280H/K290S/S298D, D280H/K290S/3298V, F243L/R292P/Y300L, F243L/R292P/Y300L/P396L, F243L/R292P/Y300L/V3051/P396L, G236A/S239D/I332E, K326A/E333A, K326W/E3335, K290E/S298G/T299A, K290N/S298G/T299A, K290E/S298G/T299A/K326E, K290N/S298G/T299A/K326E

[0203] Fucosylation is another method of increasing effector function of IgG Fc-containing proteins. Removal of the core fucose from the biantennary complex-type oligosachharides attached to the Fc greatly increases ADCC effector function without altering antigen binding or CDC effector function. There are different ways to reduce or abolish fucosylation of Fc-containing molecules. These include recombinant expression in certain mammalian cell lines including a FUT8 knockout cell line, variant CHO line Lec13, rat hybridoma cell line YB2/0, a cell line comprising a small interfering RNA specifically against the FUT8 gene, and a cell line co-expressing β-1,4-N-acetylglucosaminyltransferase III and Golgi α-mannosidase II. Alternatively, the Fc-containing molecule can be expressed in a non-mammalian cell such as a plant cell, yeast, or prokaryotic cell, e.g., E. coli.

[0204] It may be desirable to decrease effector function, Exemplary Fc molecules having decreased effector function include those having the following substitutions:

### N297A or N297Q (IgG1), L234A/L235A (IgG1), V234A/G237A (IgG2), L235A/G237A/E318A (IgG4), H268Q/V309L/A330S/A331S (IgG2), C220S/C226S/C229S/P238S (IgG1), C226S/C229S/E233P/L234V/L235A (IgG1), L234F/L235E/P331S (IgG1), S267E/L328F (IgG1)

[0205] Both the light and heavy chains are divided into regions of structural and functional homology. The terms “constant” and “variable” are used functionally. In this regard, it will be appreciated that the variable domains of both the light (VL) and heavy (VH) chain portions determine antigen recognition and specificity. Conversely, the constant domains of the light chain (CL) and the heavy chain (CHI, CH2 and CH3) confer important biological properties such as secretion, transplacental mobility, Fc receptor binding, complement binding, and the like. By convention, the numbering of the constant region domains in conventional antibodies increases as they become more distal from the antigen-binding site or amino-terminus of the antibody. In conventional antibodies, the N-terminal portion is a variable region and at the C-terminal portion is a constant region; the CH3 and CL domains comprise the carboxyterminus of the heavy and light chain, respectively.

[0206] As used herein, the term “heavy chain constant region” includes amino acid sequences derived from an immunoglobulin heavy chain. A polypeptide comprising a heavy chain constant region comprises at least one of: a CHI domain, a hinge (e.g., upper, middle, and/or lower hinge region) domain, a CH2 domain, a CH3 domain, or a variant or fragment thereof. For example, an antigen-binding polypeptide for use in the disclosure may comprise a polypeptide chain comprising a CHI domain; a polypeptide chain comprising a CHI domain, at least a portion of a hinge domain, and a CH2 domain; a polypeptide chain comprising a CHI domain and a CH3 domain; a polypeptide chain comprising a CHI domain, at least a portion of a hinge domain, and a CH3 domain, or a polypeptide chain comprising a CHI domain, at least a portion of a hinge domain, a CH2 domain, and a CH3 domain. In some embodiments, a polypeptide of the disclosure comprises a polypeptide chain comprising a CH3 domain. Further, an antibody for use in the disclosure may lack at least a portion of a CH2 domain (e.g., all or part of a CH2 domain). It should be understood that the heavy chain constant region may be modified such that they vary in amino acid sequence from the naturally occurring immunoglobulin molecule.

[0207] The heavy chain constant region of an antibody disclosed herein may be derived from different immunoglobulin molecules. For example, a heavy chain constant region of a polypeptide may comprise a CHI domain derived from an IgG1 molecule and a hinge region derived from an IgG3 molecule. In another example, a heavy chain constant region can comprise a hinge region derived, in part, from an IgG1 molecule and, in part, from an IgG3 molecule. In another example, a heavy chain portion can comprise a chimeric hinge derived, in part, from an IgG1 molecule and, in part, from an IgG4 molecule.

[0208] As used herein, the term “light chain constant region” includes amino acid sequences derived from antibody light chain. Preferably, the light chain constant region comprises at least one of a constant kappa domain or constant lambda domain. A “light chain heavy chain pair” refers to the collection of a light chain and heavy chain that can form a dimer through a disulfide bond between the CL domain of the light chain and the CHI domain of the heavy chain.

[0209] The subunit structures and three-dimensional configurations of the constant regions of the various immunoglobulin classes are well known. As used herein, the term “VH domain” includes the amino terminal variable domain of an immunoglobulin heavy chain and the term “CHI domain” includes the first (most amino terminal) constant region domain of an immunoglobulin heavy chain. The CHI domain is adjacent to the VH domain and is amino terminal to the hinge region of an immunoglobulin heavy chain molecule.

[0210] As used herein the term “CH2 domain” includes the portion of a heavy chain molecule that extends, e.g., from about residue 244 to residue 360 of an antibody using conventional numbering schemes (residues 244 to 360, Kabat numbering system; and residues 231-340, EU numbering system). The CH2 domain is unique in that it is not closely paired with another domain. Rather, two N-linked branched carbohydrate chains are interposed between the two CH2 domains of an intact native IgG molecule. The CH3 domain extends from the CH2 domain to the C-terminal of the IgG molecule and comprises approximately 108 residues.

[0211] As used herein, the term “hinge region” includes the portion of a heavy chain molecule that joins the CHI domain to the CH2 domain. This hinge region comprises approximately 25 residues and is flexible, thus allowing the two N-terminal antigen-binding regions to move independently. Hinge regions can be subdivided into three distinct domains: upper, middle, and lower hinge domains.

[0212] The term “bi-specific monoclonal antibody” or “BSMAb” refers to an antibody that can simultaneously engage two different types of epitopes on the same target or on different targets. An advantage is their ability to redirect specific polyclonal immune cells (e.g. T cells and NK cells) to tumor cells to enhance tumor killing. These antibodies can be divided into two types: IgG like bispecific antibodies which carry an Fc region and therefore retain Fc-mediated effector functions and the non-IgG like formats which rely on their antigen binding capacity to exert their effects. Recombinant techniques have also led to the creation of small fragment molecules. Single chain variable fragments from two different monoclonal antibodies can be combined to form bivalent bispecific antibodies. Examples include bispecific T cell engagers (BiTEs), tandem single chain variable fragments (taFvs), diabodies (Dbs), single chain diabodies (scDbs), and triple bodies. These scFv based antibody fragments have high tumor specificity and tumor penetration due to their small size (ranging from 50 to 60 kDa).

[0213] The term “tri-specific monoclonal antibody” or “TSMAb” refers to an antibody that can simultaneously engage three different types of epitopes on the same target or on different targets.

[0214] The term “scFv” or “scFv fragment antibody” refers to a small molecular antibody, consisting of VH and VL domains, either in the configuration of VL-VH or VH-VL, with a linker region between them. The scFv fragment antibody can more easily penetrate blood vessel wall and the solid tumor, which makes it a preferred carrier of targeting drugs.

[0215] The term “scFvs” or “single-chain variable fragment” refers to divalent (or bivalent) single-chain variable fragments (di-scFvs, bi-scFvs) that can be engineered by linking two scFvs. This can be done by producing a single peptide chain with two VH and two VL regions, yielding tandem scFvs, also known as scFv-scFv molecules. Another possibility is the creation of scFvs with linker peptides that are too short for the two variable regions to fold together (about five amino acids), forcing scFvs to dimerize. This type is known as diabodies.

[0216] The term “humanized antibody” refers to an antibody from non-human species whose protein sequences have been modified to increase its similarity to antibody variants produced naturally in humans. The process of “humanization” is usually applied to monoclonal antibodies developed for administration to humans (e.g. antibodies developed as anti-cancer drugs). Humanization can be necessary when the process of developing a specific antibody involves generation in a non-human immune system (such as that in mice).

[0217] Bispecific or trispecific antibodies can be generated by chemical cross-linking or by the hybrid hybridoma technology. Alternatively, bispecific or trispecific antibody molecules can be produced by recombinant techniques, for example by linking 2 scFv molecules together with a short linker. For example, VH1-Linker1-VL1-Linker2-VH2-Linker3-VL2. With Linker1 and Linker3 having lengths between 15-30 amino acids and Linker2 being 5-10 amino acids in length. Linkers may be composed of a variety of amino acids, for example repeating units of GGGGS, GKPGS, GEPGS, and/or GGPGS. Dimerization across 2 scFv molecules can be promoted by reducing the length of the linker joining the VH and the VL domain from about 15 amino acids, routinely used to produce scFv fragments, to about 5 amino acids. These linkers favor intrachain assembly of the VH and VL domains, with the configuration VH1-linker1-VL2-Linker2-VH2-Linker 3VL1 and linkers 1 and 3 being 5 amino acids in length. Any suitable short linker can be used. Thus, two fragments assemble into a dimeric molecule. Further reduction of the linker length to 0-2 amino acids can generate trimeric (triabodies) or tetrameric (tetrabodies) molecules.

[0218] A “chimeric antibody” is an antibody molecule in which (a) the constant region, or a portion thereof, is altered, replaced or exchanged so that the antigen binding site (variable region) is linked to a constant region of a different or altered class, effector function and/or species, or an entirely different molecule which confers new properties to the chimeric antibody, e.g., an enzyme, toxin, hormone, growth factor, drug, etc.; or (b) the variable region, or a portion thereof, is altered, replaced or exchanged with a variable region having a different or altered antigen specificity.

[0219] One of the challenges for efficiently producing bispecific antibody preparations concerns reducing the formation of homodimeric molecules in favor of heterodimeric molecules, when co-expressing chains of different binding specificities. A “heterodimeric antibody” can utilize the “knobs-into-holes” or “charge-pair” formats to preferentially promote correct association of the 2 molecules to form a heterodimer with 2 specificities. These formats are specific to the heavy chain Fc part of the constant region in antibodies. For the knob-into-holes format, the “knobs” part is engineered by replacing a small amino acid with a larger one. It fits into the “hole,” which is engineered by replacing a large amino acid with a smaller one. Introduction of T366W mutations in the first Fc creates the “knob” and introduction of T366S, L368A, and Y407V mutations in the second Fc creates the “hole” (numbering of the residues according to the Kabat EU numbering system). For the charge pair format, heterodimerization is favored through stabilizing ionic interactions by introducing interfacing charge residues in the opposing Fc domains. For example, D356K, E357K, and D399K in a first Fc domain, and the mutations K370E, K409D, and K439E into a second Fc domain, or combination thereof. For example, K392D and K409D mutations in a first Fc chain, and D399K and D356K mutations in a second Fc chain, K409E in the first Fc and D399K in the Fc, K409E in the first Fc and D399R in the second Fc, K409D in the first Fc and D399K in the second Fc, K409D in the first Fc and D399R in the second Fc, K392E in the first Fc and D399R in the second Fc, K392E in the first Fc and D399K in the second Fc, K392D in the first Fc and D399R in the second Fc, K392D in the first Fc and D399K in the second Fc, K409D and K360D in the first Fc and D399K and D356K in the second Fc, K409D and K370D in the first Fc and D399K and E357K in the second Fc, K409D and K392D in the first Fc and D399K, D356K, and E357K in the second Fc, K409D and K392D in the first Fc and D399K in the second Fc, K409D and K392D in the first Fc and D399K and D356K in the second Fc, K409D and K392D in the first Fc and D399K and E357K in the second Fc, K409D and K370D in the first Fc and D399K and D357K in the second Fc, D399K in the first Fc and K409D and K360D in the second Fc, and/or K409D and K439D in the first Fc and D399K and D356K in the second Fc, numbered according to the Kabat EU numbering system. Additionally, cysteines may be introduced to stabilize the pairing of heterodimers, for example S234C in the first Fc and Y349C in the second Fc or Y349C in the first Fc and S344C in the second Fc.

[0220] The phrase “specifically (or selectively) binds” to an antibody or “specifically (or selectively) immunoreactive with,” when referring to a protein or peptide, refers to a binding reaction that is determinative of the presence of the protein, often in a heterogeneous population of proteins and other biologics. Thus, under designated immunoassay conditions, the specified antibodies bind to a particular protein at least two times the background and more typically more than 10 to 100 times background. Specific binding to an antibody under such conditions requires an antibody that is selected for its specificity for a particular protein. For example, polyclonal antibodies can be selected to obtain only those polyclonal antibodies that are specifically immunoreactive with the selected antigen and not with other proteins. This selection may be achieved by subtracting out antibodies that cross-react with other molecules. A variety of immunoassay formats may be used to select antibodies specifically immunoreactive with a particular protein. For example, solid-phase ELISA immunoassays are routinely used to select antibodies specifically immunoreactive with a protein (see, e.g., Harlow & Lane, Using Antibodies, A Laboratory Manual (1998) for a description of immunoassay formats and conditions that can be used to determine specific immunoreactivity).

[0221] An “immune response” refers to the action of a cell of the immune system (for example, T lymphocytes, B lymphocytes, natural killer (NK) cells, macrophages, eosinophils, mast cells, dendritic cells and neutrophils) and soluble macromolecules produced by any of these cells or the liver (including Abs, cytokines, and complement) that results in selective targeting, binding to, damage to, destruction of, and/or elimination from a vertebrate's body of invading pathogens, cells or tissues infected with pathogens, cancerous or other abnormal cells, or, in cases of autoimmunity, neurodegeneration or pathological inflammation, normal human cells or tissues.

[0222] An “immunoregulator” refers to a substance, an agent, a signaling pathway or a component thereof that regulates an immune response. “Regulating,” “modifying” or “modulating” an immune response refers to any alteration in a cell of the immune system or in the activity of such cell. Such regulation includes stimulation or suppression of the immune system which may be manifested by an increase or decrease in the number of various cell types, an increase or decrease in the activity of these cells, or any other changes which can occur within the immune system. Both inhibitory and stimulatory immunoregulators have been identified, some of which may have enhanced function in the cancer, infectious disease or neurodegenerative microenvironment.

[0223] A cytotoxic T cell (also known as TC, cytotoxic T lymphocyte, CTL, T-killer cell, cytolytic T cell, CD8+ T-cell or killer T cell) is a T lymphocyte (a type of white blood cell) that kills cancer cells, cells that are infected (particularly with viruses), or cells that are damaged in other ways.

[0224] The term “immunotherapy” refers to the treatment of a subject afflicted with, or at risk of contracting or suffering a recurrence of, a disease by a method comprising inducing, enhancing, suppressing or otherwise modifying an immune response. “Treatment” or “therapy” of a subject refers to any type of intervention or process performed on, or the administration of an active agent to, the subject with the objective of reversing, alleviating, ameliorating, inhibiting, slowing down or preventing the onset, progression, development, severity or recurrence of a symptom, complication, condition or biochemical indicia associated with a disease.

[0225] “Potentiating an endogenous immune response” means increasing the effectiveness or potency of an existing immune response in a subject. This increase in effectiveness and potency may be achieved, for example, by overcoming mechanisms that suppress the endogenous host immune response or by stimulating mechanisms that enhance the endogenous host immune response.

[0226] Nucleic acid is “operably linked” when it is placed into a functional relationship with another nucleic acid sequence. For example, DNA for a pre-sequence or secretory leader is operably linked to DNA for a polypeptide if it is expressed as a pre-protein that participates in the secretion of the polypeptide; a promoter or enhancer is operably linked to a coding sequence if it affects the transcription of the sequence; or a ribosome binding site is operably linked to a coding sequence if it is positioned so as to facilitate translation. Generally, “operably linked” means that the DNA sequences being linked are near each other, and, in the case of a secretory leader, contiguous and in reading phase. However, enhancers do not have to be contiguous. Linking is accomplished by ligation at convenient restriction sites. If such sites do not exist, the synthetic oligonucleotide adaptors or linkers are used in accordance with conventional practice.

[0227] “Conservatively modified variants” applies to both amino acid and nucleic acid sequences. With respect to particular nucleic acid sequences, conservatively modified variants refers to those nucleic acids which encode identical or essentially identical amino acid sequences, or where the nucleic acid does not encode an amino acid sequence, to essentially identical sequences. Because of the degeneracy of the genetic code, a large number of functionally identical nucleic acids encode any given protein. For instance, the codons GCA, GCC, GCG and GCU all encode the amino acid alanine. Thus, at every position where an alanine is specified by a codon, the codon can be altered to any of the corresponding codons described without altering the encoded polypeptide. Such nucleic acid variations are “silent variations,” which are one species of conservatively modified variations. Every nucleic acid sequence herein which encodes a polypeptide also describes every possible silent variation of the nucleic acid. One of skill will recognize that each codon in a nucleic acid (except AUG, which is ordinarily the only codon for methionine, and TGG, which is ordinarily the only codon for tryptophan) can be modified to yield a functionally identical molecule. Accordingly, each silent variation of a nucleic acid which encodes a polypeptide is implicit in each described sequence with respect to the expression product, but not with respect to actual probe sequences.

[0228] The terms “identical” or percent “identity,” in the context of two or more nucleic acids or polypeptide sequences, refer to two or more sequences or subsequences that are the same or have a specified percentage of amino acid residues or nucleotides that are the same (i.e., about 60% identity, preferably 65%, 70%, 75%, 80%, 85%, 90%, 91%, 92%, 93%, 94%, 95%, 96%, 97%, 98%, 99%, or higher identity over a specified region, when compared and aligned for maximum correspondence over a comparison window or designated region) as measured using a BLAST or BLAST 2.0 sequence comparison algorithms with default parameters described below, or by manual alignment and visual inspection. Such sequences are then said to be “substantially identical.” This definition also refers to, or may be applied to, the compliment of a test sequence. The definition also includes sequences that have deletions and/or additions, as well as those that have substitutions. As described below, the preferred algorithms can account for gaps and the like. Preferably, identity exists over a region that is at least about 25 amino acids or nucleotides in length, or more preferably over a region that is 50-100 amino acids or nucleotides in length.

[0229] For sequence comparison, typically one sequence acts as a reference sequence, to which test sequences are compared. When using a sequence comparison algorithm, test and reference sequences are entered into a computer, subsequence coordinates are designated, if necessary, and sequence algorithm program parameters are designated. Preferably, default program parameters can be used, or alternative parameters can be designated. The sequence comparison algorithm then calculates the percent sequence identities for the test sequences relative to the reference sequence, based on the program parameters.

[0230] A “comparison window,” as used herein, includes reference to a segment of any one of the number of contiguous positions selected from the group consisting of from 20 to the full length of the reference sequence, usually about 25 to 100, or 50 to about 150, more usually about 100 to about 150 in which a sequence may be compared to a reference sequence of the same number of contiguous positions after the two sequences are optimally aligned. Methods of alignment of sequences for comparison are well-known in the art. Optimal alignment of sequences for comparison can be conducted, e.g., by the local homology algorithm of Smith & Waterman, Adv. Appl. Math. 2:482 (1981), by the homology alignment algorithm of Needleman & Wunsch, J. Mol. Biol. 48:443 (1970), by the search for similarity method of Pearson & Lipman, Proc. Nat'l. Acad. Sci. USA 85:2444 (1988), by computerized implementations of these algorithms (GAP, BESTFIT, FASTA, and TFASTA in the Wisconsin Genetics Software Package, Genetics Computer Group, 575 Science Dr., Madison, Wis.), or by manual alignment and visual inspection (see, e.g., Current Protocols in Molecular Biology (Ausubel et al., eds. 1995 supplement)).

[0231] A preferred example of algorithm that is suitable for determining percent sequence identity and sequence similarity are the BLAST and BLAST 2.0 algorithms, which are described in Altschul et al., Nuc. Acids Res. 25:3389-3402 (1977) and Altschul et al., J. Mol. Biol. 215:403-410 (1990), respectively. BLAST and BLAST 2.0 are used, with the parameters described herein, to determine percent sequence identity for the nucleic acids and proteins of the invention. Software for performing BLAST analyses is publicly available through the National Center for Biotechnology Information. This algorithm involves first identifying high scoring sequence pairs (HSPs) by identifying short words of length W in the query sequence, which either match or satisfy some positive-valued threshold score T when aligned with a word of the same length in a database sequence. T is referred to as the neighborhood word score threshold (Altschul et al., supra). These initial neighborhood word hits act as seeds for initiating searches to find longer HSPs containing them. The word hits are extended in both directions along each sequence for as far as the cumulative alignment score can be increased. Cumulative scores are calculated using, for nucleotide sequences, the parameters M (reward score for a pair of matching residues; always >0) and N (penalty score for mismatching residues; always <0). For amino acid sequences, a scoring matrix is used to calculate the cumulative score. Extension of the word hits in each direction are halted when: the cumulative alignment score falls off by the quantity X from its maximum achieved value; the cumulative score goes to zero or below, due to the accumulation of one or more negative-scoring residue alignments; or the end of either sequence is reached. The BLAST algorithm parameters W, T, and X determine the sensitivity and speed of the alignment. The BLASTN program (for nucleotide sequences) uses as defaults a wordlength (N) of 11, an expectation (E) of 10, M=5, N=−4 and a comparison of both strands. For amino acid sequences, the BLASTP program uses as defaults a wordlength of 3, and expectation (E) of 10, and the BLOSUM62 scoring matrix (see Henikoff & Henikoff, Proc. Natl. Acad. Sci. USA 89:10915 (1989)) alignments (B) of 50, expectation (E) of 10, M=5, N=−4, and a comparison of both strands.

[0232] “Nucleic acid” refers to deoxyribonucleotides or ribonucleotides and polymers thereof in either single- or double-stranded form, and complements thereof. The term encompasses nucleic acids containing known nucleotide analogs or modified backbone residues or linkages, which are synthetic, naturally occurring, and non-naturally occurring, which have similar binding properties as the reference nucleic acid, and which are metabolized in a manner similar to the reference nucleotides. Examples of such analogs include, without limitation, phosphorothioates, phosphoramidates, methyl phosphonates, chiral-methyl phosphonates, 2-O-methyl ribonucleotides, peptide-nucleic acids (PNAs).

[0233] Unless otherwise indicated, a particular nucleic acid sequence also implicitly encompasses conservatively modified variants thereof (e.g., degenerate codon substitutions) and complementary sequences, as well as the sequence explicitly indicated. Specifically, degenerate codon substitutions may be achieved by generating sequences in which the third position of one or more selected (or all) codons is substituted with mixed-base and/or deoxyinosine residues (Batzer et al., Nucleic Acid Res. 19:5081 (1991); Ohtsuka et al., J. Biol. Chem. 260:2605-2608 (1985); Rossolini et al., Mol. Cell. Probes 8:91-98 (1994)). The term nucleic acid is used interchangeably with gene, cDNA, mRNA, oligonucleotide, and polynucleotide.

[0234] A particular nucleic acid sequence also implicitly encompasses “splice variants.” Similarly, a particular protein encoded by a nucleic acid implicitly encompasses any protein encoded by a splice variant of that nucleic acid. “Splice variants,” as the name suggests, are products of alternative splicing of a gene. After transcription, an initial nucleic acid transcript may be spliced such that different (alternate) nucleic acid splice products encode different polypeptides. Mechanisms for the production of splice variants vary, but include alternate splicing of exons. Alternate polypeptides derived from the same nucleic acid by read-through transcription are also encompassed by this definition. Any products of a splicing reaction, including recombinant forms of the splice products, are included in this definition. An example of potassium channel splice variants is discussed in Leicher et al., J. Biol. Chem. 273(52):35095-35101 (1998).

[0235] The term “heterologous” when used with reference to portions of a nucleic acid indicates that the nucleic acid comprises two or more subsequences that are not found in the same relationship to each other in nature. For instance, the nucleic acid is typically recombinantly produced, having two or more sequences from unrelated genes arranged to make a new functional nucleic acid, e.g., a promoter from one source and a coding region from another source. Similarly, a heterologous protein indicates that the protein comprises two or more subsequences that are not found in the same relationship to each other in nature (e.g., a fusion protein).

[0236] As used herein, the term “prevention” means all of the actions by which the occurrence of the disease is restrained or retarded.

[0237] As used herein, the term “treatment” means all of the actions by which the symptoms of the disease have been alleviated, improved or ameliorated. In the present specification, “treatment” means that the symptoms of cancer, neurodegeneration, or infectious disease are alleviated, improved or ameliorated by administration of the antibodies disclosed herein.

[0238] The term “administration” refers to the introduction of an amount of a predetermined substance into a patient by a certain suitable method. The composition disclosed herein may be administered via any of the common routes, as long as it is able to reach a desired tissue, for example, but is not limited to, intraperitoneal, intravenous, intramuscular, subcutaneous, intradermal, oral, topical, intranasal, intrapulmonary, or intrarectal administration. However, since peptides are digested upon oral administration, active ingredients of a composition for oral administration should be coated or formulated for protection against degradation in the stomach.

[0239] The term “subject” refers to those suspected of having or diagnosed with cancer, a neurodegenerative or an infectious disease. However, any subject to be treated with the pharmaceutical composition disclosed herein is included without limitation. The pharmaceutical composition including an anti-DLL3 antibody disclosed herein is administered to a subject suspected of having cancer, a neurodegenerative or an infectious disease.

[0240] Construction of suitable vectors containing the desired sequences and control sequences employs standard ligation and restriction techniques, which are well understood in the art (see Maniatis et al., in Molecular Cloning: A Laboratory Manual, Cold Spring Harbor Laboratory, New York (1982)). Isolated plasmids, DNA sequences, or synthesized oligonucleotides are cleaved, tailored, and re-ligated in the form desired.

[0241] For preparation of antibodies, e.g., recombinant, monoclonal, or polyclonal antibodies, many techniques known in the art can be used (see, e.g., Kohler & Milstein, Nature 256:495-497 (1975); Kozbor et al., Immunology Today 4:72 (1983); Cole et al., in Monoclonal Antibodies and Cancer Therapy, Alan R. Liss, Inc., pp. 77-96 (1985); Coligan, Current Protocols in Immunology (1991); Harlow & Lane, Antibodies, A Laboratory Manual (1988); and Goding, Monoclonal Antibodies: Principles and Practice (2d ed. 1986)). The genes encoding the heavy and light chains of an antibody of interest can be cloned from a cell, e.g., the genes encoding a monoclonal antibody can be cloned from a hybridoma and used to produce a recombinant monoclonal antibody. Gene libraries encoding heavy and light chains of monoclonal antibodies can also be made from hybridoma or plasma cells. Random combinations of the heavy and light chain gene products generate a large pool of antibodies with different antigenic specificity (see, e.g., Kuby, Immunology (3rd ed. 1997)). Techniques for the production of single chain antibodies or recombinant antibodies (U.S. Pat. Nos. 4,946,778, 4,816,567) can be adapted to produce antibodies to polypeptides of this invention. Also, transgenic mice, or other organisms such as other mammals, may be used to express humanized or human antibodies (see, e.g., U.S. Pat. Nos. 5,545,807; 5,545,806; 5,569,825; 5,625,126; 5,633,425; 5,661,016, Marks et al., Bio/Technology 10:779-783 (1992); Lonberg et al., Nature 368:856-859 (1994); Morrison, Nature 368:812-13 (1994); Fishwild et al., Nature Biotechnology 14:845-51 (1996); Neuberger, Nature Biotechnology 14:826 (1996); and Lonberg & Huszar, Intern. Rev. Immunol. 13:65-93 (1995)). Alternatively, phage display technology can be used to identify antibodies and heteromeric Fab fragments that specifically bind to selected antigens (see, e.g., McCafferty et al., Nature 348:552-554 (1990); Marks et al., Biotechnology 10:779-783 (1992)). Antibodies can also be made bispecific, i.e., able to recognize two different antigens (see, e.g., WO 93/08829, Traunecker et al., EMBO J. 10:3655-3659 (1991); and Suresh et al., Methods in Enzymology 121:210 (1986)). Antibodies can also be heteroconjugates, e.g., two covalently joined antibodies, or immunotoxins (see, e.g., U.S. Pat. No. 4,676,980, WO 91/00360; and WO 92/200373).

[0242] Methods for humanizing antibodies are well known in the art. Generally, a humanized antibody has one or more amino acid residues introduced into it from a source which is non-human. These non-human amino acid residues are often referred to as import residues, which are typically taken from an import variable domain. Humanization can be essentially performed following the method of Winter and co-workers (see, e.g., Jones et al., Nature 321:522-525 (1986); Riechmann et al., Nature 332:323-327 (1988); Verhoeyen et al., Science 239:1534-1536 (1988) and Presta, Curr. Op. Struct. Biol. 2:593-596 (1992)), by substituting rodent CDRs or CDR sequences for the corresponding sequences of a human antibody. Accordingly, such humanized antibodies are chimeric antibodies (U.S. Pat. No. 4,816,567), wherein substantially less than an intact human variable domain has been substituted by the corresponding sequence from a non-human species. In practice, humanized antibodies are typically human antibodies in which some CDR residues and possibly some FR residues are substituted by residues from analogous sites in rodent antibodies.

[0243] The term “cancer” refers to human cancers and carcinomas, sarcomas, adenocarcinomas, etc., including solid tumors, kidney, breast, lung, kidney, bladder, urinary tract, urethra, penis, vulva, vagina, cervical, colon, ovarian, prostate, pancreas, stomach, brain, head and neck, skin, uterine, testicular, esophagus, and liver cancer. Additional cancers include, for example, Hodgkin's Disease, multiple myeloma, neuroblastoma, breast cancer, ovarian cancer, lung cancer, rhabdomyosarcoma, primary thrombocytosis, primary macroglobulinemia, small-cell lung tumors, primary brain tumors, stomach cancer, colon cancer, malignant pancreatic insulanoma, malignant carcinoid, premalignant skin lesions, testicular cancer, thyroid cancer, neuroblastoma, esophageal cancer, genitourinary tract cancer, malignant hypercalcemia, cervical cancer, endometrial cancer, and adrenal cortical cancer.

[0244] The term “checkpoint inhibitor” or “immune checkpoint inhibitor” refers to an agent such as a drug that inhibits/blocks the inhibitory checkpoint molecules. Some cancers can protect themselves from attack by stimulating immune checkpoint targets. Checkpoint therapy can block inhibitory checkpoints, restoring immune system function.

[0245] The term “immune checkpoint regulator” refers to receptors and their associated ligands, which together provide a means for inhibiting or stimulating signaling pathways that otherwise lead to T-cell activation. Immune checkpoint regulators include TIGIT and its CD155 ligand, PVR; PD-1 and its ligands, PD-L1 and PD-L2; CTLA-4 and its ligands, B7-1 and B7-2; TIM-3 and its ligand, Galectin-9; LAG-3 and its ligands, including liver sinusoidal endothelial cell lectin (LSECtin) and Galectin-3; CD122 and its CD122R ligands; CD70, B7H3, B and T lymphocyte attenuator (BTLA), and VISTA.

[0246] The term “checkpoint regulator antagonist,” “immune checkpoint binding antagonist” and “immune checkpoint antagonist” refer to a class of agents that interfere with (or inhibit) the activity of an immune checkpoint regulator so that, as a result of the binding to the checkpoint regulator or its ligand, signaling through the checkpoint regulator receptor is blocked or inhibited. By inhibiting this signaling, immune-suppression can be reversed so that T cell immunity against cancer cells can be re-established or enhanced. Immune checkpoint regulator antagonists include antibody fragments, peptide inhibitors, dominant negative peptides and small molecule drugs, either in isolated forms or as part of a fusion protein or conjugate. Example targets of checkpoint regulator antagonists include PD1, PDL1, CTLA4, LAG3, TIM-3, TIGIT, VISTA.

[0247] The term “immune checkpoint binding agonist” and “immune checkpoint agonist” refer to a class of agents that stimulate the activity of an immune checkpoint regulator so that, as a result of the binding to the checkpoint regulator or its ligand, signaling through the checkpoint regulator receptor is stimulated. By stimulating this signaling, T cell immunity against cancer cells can be re-established or enhanced. The targets of checkpoint regulator agonists include members of the tumor necrosis factor (TNF) receptor superfamily, such as CD27, CD40, OX40 (CD 134), glucocorticoid-induced TNFR family-related protein (GITR), and 4-1BB (CD137) and their ligands. Additional targets of checkpoint regulator agonists belong to the B7-CD28 superfamily, including CD28 and ICOS.

[0248] In any of the embodiments above, one or more cancer therapies, e.g., chemotherapy, radiation therapy, immunotherapy, surgery, or hormone therapy can be co-administered further with an antibody of the invention.

[0249] In one embodiment, the chemotherapeutic reagent is an alkylating agent: nitrogen mustards, nitrosoureas, tetrazines, aziridines, cisplatins and derivatives, and non-classical alkylating agents. Nitrogen mustards include mechlorethamine, cyclophosphamide, melphalan, chlorambucil, ifosfamide and busulfan. Nitrosoureas include N-Nitroso-N-methylurea (MNU), carmustine (BCNU), lomustine (CCNU) and semustine (MeCCNU), fotemustine and streptozotocin. Tetrazines include dacarbazine, mitozolomide and temozolomide. Aziridines include thiotepa, mytomycin and diaziquone (AZQ). Cisplatin and derivatives include cisplatin, carboplatin and oxaliplatin. In one embodiment the chemotherapeutic reagent is an anti-metabolites: the anti-folates (e.g., methotrexate), fluoropyrimidines (e.g., fluorouracil and capecitabine), deoxynucleoside analogues and thiopurines. In another embodiment the chemoptheraputic reagent is an anti-microtubule agent such as vinca alkaloids (e.g., vincristine and vinblastine) and taxanes (e.g., paclitaxel and docetaxel). In another embodiment the chemotherapeutic reagent is a topoisomerase inhibitor or a cytotoxic antibiotic such as doxorubicin, mitoxantrone, bleomycin, actinomycin, and mitomycin.

[0250] The contacting of the patient with the antibody or antibody fragment, can be by administering the antibody to the patient intravenously, intraperitoneally, intramuscularly, intratumorally, or intradermally. In some embodiments the antibody is co-administered with a cancer therapy agent.

[0251] The term “formulation” as used herein refers to the antibodies disclosed herein and excipients combined together which can be administered and has the ability to bind to the corresponding receptors and initiate a signal transduction pathway resulting in the desired activity. The formulation can optionally comprise other agents.

[0252] All numerical designations, e.g., pH, temperature, time, concentration, and molecular weight, including ranges, are to be understood as approximations in accordance with common practice in the art. When used herein, the term “about” may connote variation (+) or (−) 1%, 5% or 10% of the stated amount, as appropriate given the context. It is to be understood, although not always explicitly stated, that the reagents described herein are merely exemplary and that equivalents of such are known in the art.

[0253] Many known and useful compounds and the like can be found in Remington's Pharmaceutical Sciences (13th Ed), Mack Publishing Company, Easton, Pa.—a standard reference for various types of administration. As used herein, the term “formulation(s)” means a combination of at least one active ingredient with one or more other ingredient, also commonly referred to as excipients, which may be independently active or inactive. The term “formulation” may or may not refer to a pharmaceutically acceptable composition for administration to humans or animals and may include compositions that are useful intermediates for storage or research purposes.

[0254] As the patients and subjects of the invention method are, in addition to humans, veterinary subjects, formulations suitable for these subjects are also appropriate. Such subjects include livestock and pets as well as sports animals such as horses, greyhounds, and the like.

### DETAILED DESCRIPTION

[0255] The DLL3 gene provides instructions for making a protein that helps control the Notch pathway, an important pathway in embryonic development. DLL3 is usually an intracellular protein but it is also expressed on the surface of cancer cells. DLL3 is expressed normally on the inside of cells and at low levels on normal tissues. However, lung tumor cells overexpress the gene and cell surface DLL3 levels are increased. Recent studies have reported that DLL3 is also expressed in other tumor types of neuroendocrine origin, including melanoma, glioblastoma multiforme, small cell bladder cancer, metastatic castration-resistant prostate cancer, and neuroendocrine lung tumors.

[0256] CD (cluster of differentiation) molecules (e.g. CD3, CD28 and CD137) CD3, CD28 and CD137 are receptors present on T cells. T cells can be activated by antigen-presenting cells via CD3, CD28 and CD137. Two parallel therapeutic strategies are pursued for activating or engaging T cells to kill tumor cells.

[0257] Embodiments of the invention include methods of diagnosing, prognosing, treating, monitoring and preventing cancer, including refractory cancer, using anti-DLL3 antibodies and antibody conjugates, pharmaceutical compositions thereof, and articles of manufacture. More specifically, the invention is directed to bispecific or trispecific molecules that bind to DLL3 and activate CD (cluster of differentiation) molecules (e.g. CD3, CD28 and CD137).

[0258] Embodiments of the invention also include methods of diagnosing, prognosing, treating, monitoring and preventing cancer, including refractory cancer, using anti-MUC17 antibodies and antibody conjugates, pharmaceutical compositions thereof, and articles of manufacture. More specifically, the invention is directed to bispecific or trispecific molecules that bind to MUC17 and activate CD (cluster of differentiation) molecules (e.g. CD3, CD28 and CD137).

[0259] Embodiments of the invention also include methods of diagnosing, prognosing, treating, monitoring and preventing cancer, including refractory cancer, using anti-CLDN18.2 antibodies and antibody conjugates, pharmaceutical compositions thereof, and articles of manufacture. More specifically, the invention is directed to trispecific molecules that bind to CLDN18.2 and activate CD (cluster of differentiation) molecules (e.g. CD3, CD28 and CD137).

### DLL3 T-Cell Engagers

[0260] Embodiments of the invention include bispecific and trispecific monoclonal antibodies (BSMAbs and TSMAbs, respectively). The single chain variable fragment (scFv) of a first antibody can be joined with the antigen binding fragment (Fab) of a second antibody. For example, the scFv portion of an antibody against CD3 can be linked to a Fab portion of an antibody against DLL3. They can be joined with 4×GKPGS or 4×G4S linkers. The IgG1 Fc can be heterodimerized with charge pair or “knob into hole” mutations or charge pair mutations. The Fc effector function can be minimized through the introduction of N297A/G mutations or LLP mutations. The combination can bring an effector cell (T-cell or NK cell) into the proximity of the tumor cell to enhance antitumor effect.

[0261] FIGS. 1A-1R, 8A-8C and 9A-9F depict several formats for trispecific molecules of the invention. The DLL3×CD3 trispecific molecules can activate T cell cytotoxicity against DLL3 expressing CHO cells or NCI-H82 tumor cells. This is exemplified by the release of LDH upon cell death, as well as the upregulation of CD25 on the T cells. When combined with DLL3×CD28 or DLL3×CD137 trispecific molecules, the T cells are further activated, proliferate, and release IFN gamma and IL-2.

[0262] CD28 signaling is essential for the activity of anti-PD1 and anti-PDL1 antibodies, thus co-dosing the DLL3×CD28 trispecific molecules with anti-PD1 and anti-PDL1 can improve the responses to the inhibition of the PD1/PDL1 pathway. CD137 is highly expressed on exhausted T cells, which cannot be stimulated by PD1/PDL1 stimulation alone. However, DLL3×CD137 or DLL3×CD28×CD137 stimulation combined with PD-1 blockade results in robust antitumor immunity.

[0263] FIG. 1A-1R depict trispecific molecules with combinations of an anti-DLL3 with anti-CD3, anti-CD28 and anti-CD137 in the Scfv-Scfv-Fc×Fab-Fc configuration. FIG. 1A-1F depict trispecific with the configuration scfv-DLL3scfv-Fc×Fab-Fc. FIG. 1G-1L depict trispecific molecules with the configuration DLL3scfv-scfv-Fc×Fab-Fc. FIG. 1M-1R depict depict trispecific molecules with the configuration scfv-scfv-Fc×DLL3Fab-Fc.

[0264] FIG. 8A-8C depict bispecifc and trispecific molecules with two CD137 Fab fragments. FIG. 8A depicts an anti-CD137, anti-DLL3, anti-DLL3 (Fab-Fc-Scfv) molecule. FIG. 8B depicts an anti-CD137, anti-DLL3, anti-CD3 (Fab-Fc-Scfv×Fab-Fc-Scfv) molecule. FIG. 8C depicts an anti-CD137, anti-DLL3, anti-CD3 (Fab-Fc-Scfv-Scfv×Fab-Fc) molecule.

[0265] FIG. 9A-9F depict trispecific molecules with two CD137 fragments. FIG. 9A depicts an anti-DLL3, anti-CD3, anti-CD137, anti-CD137 (scfv-scfv-Fc-Scfv×Fc-Scfv) molecule. FIG. 9B depicts an anti-DLL3, anti-CD3, anti-CD137, anti-CD137 (scfv-scfv-Fc×Scfv-Fc-Scfv) molecule. FIG. 9C depicts an anti-CD137, anti-CD137, anti-DLL3 (scfv-scfv-Fc×Fab-Fc) molecule. FIG. 9D depicts an anti-DLL3, anti-CD137, anti-CD137 (scfv-scfv-Fc×Fab-Fc) molecule. FIG. 9E depicts an anti-DLL3, anti-CD3, anti-DLL3, anti-CD137 (Fab-Fc-Scfv×Scfv-Fc-Scfv) molecule. FIG. 9F depicts an anti-DLL3, anti-CD3, anti-CD137, anti-CD137 (Fab-Fc-Scfv-Scfv×Scfv-Fc) molecule.

### MUC17 T-Cell Engagers

[0266] FIGS. 10A-10R, 18A-18D and 19A-19J depict several formats for trispecific molecules of the invention.

[0267] FIG. 10A-10R depict trispecific molecules with combinations of an anti-MUC17 with anti-CD3, anti-CD28 and anti-CD137 in the Scfv-scfv-Fc×Fab-Fc configuration. FIG. 10A-10F depict trispecific with the configuration scfv-MUC17scfv-Fc×Fab-Fc. FIG. 1G-1L depict trispecific molecules with the configuration MUC17scfv-scfv-Fc×Fab-Fc. FIG. 1M-1R depict depict trispecific molecules with the configuration scfv-scfv-Fc×MUC17Fab-Fc.

[0268] FIG. 18A-18D depict Muc17×CD137 and DLL3×CD137 bispecifc molecules.

[0269] FIG. 19A-19C depict trispecific molecules with two CD137 Fab fragments. FIG. 19A depicts an anti-CD137, anti-MUC17, anti-MUC17 (Fab-Fc-Scfv-Scfv) molecule. FIG. 19B depicts an anti-CD137, anti-MUC17, anti-CD3 (Fab-Fc-Scfv×Fab-Fc-Scfv) molecule. FIG. 19C depicts an anti-CD137, anti-MUC17, anti-CD3 (Fab-Fc-Scfv-Scfv×Fab-Fc) molecule. FIG. 19E-9J depict bispecific molecules and trispecific molecules with two CD137 scfv fragments. FIG. 19E depicts an, anti-anti-CD137, anti-CD137, anti-MUC17 (scfv-scfv-Fc×Fab-Fc) molecule. FIG. 19F depicts an anti-MUC17, anti-CD137, anti-CD137 (scfv-scfv-Fc×Fab-Fc) molecule. FIG. 19G depicts an anti-MUC17, anti-CD137, CD3, CD137 (Fab-Fc-Scfv×Scfv-Fc-Scfv) molecule. FIG. 19H depicts an anti-MUC17, anti-CD137, anti-CD137, CD3 (Fab-Fc-Scfv-Scfv×Scfv-Fc) molecule. FIG. 19I depicts an anti-MUC17, anti-CD3, anti-CD137, anti-CD137 (scfv-scfv-FScfv×Fc-Scfv) molecule. FIG. 19J depicts an anti-DLL3, anti-CD3, anti-CD137, anti-MUC17 (scfv-scfv-Fc×Scfv-Fc-Scfv) molecule.

[0270] In an embodiment, the trispecific molecule can be co-administered or combined with an antagonist such as PD1, PDL1, TIGIT, LAG3, TIM3, VISTA or CTLA4. Alternatively, the trispecific molecule can be co-administered or combined with a bispecific antagonist such as PD1×TIGIT, LAG3×TIGIT, PD1×LAG3, PD1×TIM3 or VEGF×TGFBR2. The trispecific molecule can also be co-administered or combined with an agonist such as CD40, GITR, CD27, OX40 or 4-1BB.

### CLDN18.2 T-Cell Engagers

[0271] Embodiments of the invention include bispecific and trispecific monoclonal antibodies (BSMAbs and TSMAbs, respectively). The single chain variable fragment (scFv) of a first antibody can be joined with the antigen binding fragment (Fab) of a second antibody. For example, the scFv portion of an antibody against CD3 can be linked to a Fab portion of an antibody against CLDN8.2. They can be joined with 4×GKPGS or 4×G4S linkers. The IgG1 Fc can be heterodimerized with charge pair or “knob into hole” mutations or charge pair mutations. The Fc effector function can be minimized through the introduction of N297A/G mutations or LLP mutations. The combination can bring an effector cell (T-cell or NK cell) into the proximity of the tumor cell to enhance antitumor effect.

[0272] CD28 signaling is essential for the activity of anti-PD1 and anti-PDL1 antibodies, thus co-dosing the CLDN18.2×CD28 trispecific molecules with anti-PD1 and anti-PDL1 can improve the responses to the inhibition of the PD1/PDL1 pathway. CD137 is highly expressed on exhausted T cells, which cannot be stimulated by PD1/PDL1 stimulation alone. However, CLDN18.2×CD137 or CLDN18.2×CD28×CD137 stimulation combined with PD-1 blockade results in robust antitumor immunity.

[0273] FIGS. 20A-20R and 25A-25I depict several formats for trispecific molecules of the invention. The CLDN18.2×CD3 trispecific molecules can activate T cell cytotoxicity against CLDN18.2 expressing CHO cells or NCI-H82 tumor cells. This is exemplified by the release of LDH upon cell death, as well as the upregulation of CD25 on the T cells. When combined with CLDN18.2×CD28 or CLDN18.2×CD137 trispecific molecules, the T cells are further activated, proliferate, and release IFN gamma and IL-2.

[0274] FIG. 20A-20R depict trispecific molecules with combinations of an anti-CLDN18.2 with anti-CD3, anti-CD28 and anti-CD137 in the Scfv-scfv-Fc×Fab-Fc configuration. FIG. 20A-20F depict trispecific with the configuration scfv-CLDn18.1scfv-Fc×Fab-Fc. FIG. 20G-20L depict trispecific molecules with the configuration CLDN18.2scfv-scfv-Fc×Fab-Fc. FIG. 20M-20R depict depict trispecific molecules with the configuration scfv-scfv-Fc×CLDN18.2Fab-Fc.

[0275] FIG. 25A-25C depict CLDN18.2 bispecific and trispecific molecules with two CD137 Fab fragments.

[0276] FIG. 25A depicts an anti-CD137, anti-CLDN18.2, anti-CLDN (Fab-Fc-Scfv) molecule. FIG. 25B depicts an anti-CD137, anti-CLDN18.2, anti-CD3 (Fab-Fc-Scfv×Fab-Fc-Scfv) molecule. FIGS. 25D and 25E depict trispecific molecules with two CD137 fragments.

[0277] FIG. 25D depicts an anti-CD137, anti-CD137, anti-CLDN18.2 bispecific molecule (Scfv-Scfv-Fc×Fab-Fc). Similarly, FIG. 25E depicts an anti-CLDN18.2, anti-CD137, anti-CD137, trispecific molecule (Scfv-Scfv-Fc×Fab-Fc)

[0278] FIG. 25F-25I depict trispecific molecules with two CD137 scfv fragments. FIG. 25F depicts an anti-CLDN18.2, anti-CD3, anti-CD137, anti-CD137 (Fab-Fc-Scfv×ScfvFc-Scfv) molecule. FIG. 25G depicts an anti-CLDN18.2, anti-CD3, anti-CD137, anti-CD137 (Fab-Fc-Scfv-Scfv×Scfv-Fc) molecule. FIG. 25H depicts an anti-CLDN18.2, anti-CD3, anti-CD137, anti-CD137 (scfv-scfv-Fc-Scfv×Fc-Scfv) molecule. FIG. 25I depicts an anti-CLDN18.2, anti-CD3, anti-CD137, anti-CD137 (scfv-scfv-Fc×Scfv-Fc-Scfv) molecule.

[0279] In an embodiment, the trispecific molecule can be co-administered or combined with an antagonist such as PD1, PDL1, TIGIT, LAG3, TIM3, VISTA or CTLA4. Alternatively, the trispecific molecule can be co-administered or combined with a bispecific antagonist such as PD1×TIGIT, LAG3×TIGIT, PD1×LAG3, PD1×TIM3 or VEGF×TGFBR2. The trispecific molecule can also be co-administered or combined with an agonist such as CD40, GITR, CD27, OX40 or 4-1BB.

Methods from Producing Trispecific T-Cell Engagers

[0280] Another aspect relates to a method for producing a trispecific antibody comprising culturing a cell transiently or stably expressing one or more constructs encoding one or more polypeptide chains in the trispecific antibody; and purifying the trispecific antibody from the cultured cells. Any cell capable of producing a functional trispecific antibody can be used. In preferred embodiments, the trispecific antibody-expressing cell is of eukaryotic or mammalian origin, preferably a human cell or Chinese hamster cell. Cells from various tissue cell types may be used to express the trispecific antibodies. In other embodiments, the cell is a yeast cell, an insect cell or a bacterial cell. Preferably, the trispecific antibody-producing cell is stably transformed with a vector expressing the trispecific antibody.

[0281] One or more expression vectors encoding the antibody heavy or light chains can be introduced into a cell by any conventional method, such as by naked DNA technique, cationic lipid-mediated transfection, polymer-mediated transfection, peptide-mediated transfection, virus-mediated infection, physical or chemical agents or treatments, electroporation, etc. In addition, cells may be transfected with one or more expression vectors for expressing the trispecific antibody along with a selectable marker facilitating selection of stably transformed clones expressing the trispecific antibody. The antibodies produced by such cells may be collected and/or purified according to techniques known in the art, such as by centrifugation, chromatography, etc.

[0282] Examples of suitable selectable markers for mammalian cells include dihydrofolate reductase (DHFR), thymidine kinase, neomycin, neomycin analog G418, hydromycin, zeocin, blasticidin, and puromycin. When such selectable markers are successfully transferred into a mammalian host cell, the transformed mammalian host cell can survive if placed under selective pressure. There are two widely used distinct categories of selective regimes. The first category is based on a cell's metabolism and the use of a mutant cell line which lacks the ability to grow independent of a supplemented media. Two examples are CHO DHFR cells and mouse LTK cells. These cells lack the ability to grow without the addition of such nutrients as thymidine or hypoxanthine. Because these cells lack certain genes necessary for a complete nucleotide synthesis pathway, they cannot survive unless the missing nucleotides are provided in a supplemented media. An alternative to supplementing the media is to introduce an intact DHFR or TK gene into cells lacking the respective genes, thus altering their growth requirements. Individual cells which were not transformed with the DHFR or TK gene will not be capable of survival in non-supplemented media.

[0283] The second category is dominant selection which refers to a selection scheme used in any cell type and does not require the use of a mutant cell line. These schemes typically use a drug to arrest growth of a host cell. Those cells which have a novel gene would express a protein conveying drug resistance and would survive the selection. Examples of such dominant selection use the drugs neomycin, mycophenolic acid, or hygromycin. The three examples employ bacterial genes under eukaryotic control to convey resistance to the appropriate drug G418 or neomycin (geneticin), xgpt (mycophenolic acid) or hygromycin, respectively. Others include the neomycin analog G418 and puromycin.

[0284] Exemplary trispecific antibody-expressing cells include human Jurkat, human embryonic kidney (HEK) 293, Chinese hamster ovary (CHO) cells, mouse WEHI fibrosarcoma cells, as well as unicellular protozoan species, such as Leishmania tarentolae. In addition, stably transformed, antibody producing cell lines may be produced using primary cells immortalized with c-myc or other immortalizing agents.

[0285] In some embodiments, the cell lines express at least 1 mg, at least 2 mg, at least 5 mg, at least 10 mg, at least 20 mg, at least 50 mg, at least 100 mg, at least 500 mg, at least 1 gram, at least 2 grams, at least 4 grams, or at least 10 grams of the trispecific antibody/liter of culture. Trispecific antibodies can be isolated from trispecific antibody expressing cells following culture and maintenance in any appropriate culture medium, such as RPMI, DMEM, and AIM V®. The trispecific antibodies can be purified using conventional protein purification methodologies (e.g., affinity purification, chromatography, etc.), including the use of Protein-A or Protein-G immunoaffinity purification. In some embodiments, trispecific antibodies are engineered for secretion into culture supernatants for isolation therefrom.

### Methods of Treatment

[0286] Another aspect of the present application relates to a method for treating a cell proliferative disorder. The method comprises administering to a subject in need thereof an effective amount of a trispecific antibody according to the present disclosure. In another aspect, a method for treating a cell proliferative disorder comprises administering to a subject in need thereof an effective amount of one or more expression vectors expressing a trispecific antibody according to the present disclosure.

[0287] Any suitable route or mode of administration can be employed for providing the patient with a therapeutically or prophylactically effective dose of the trispecific antibody. Exemplary routes or modes of administration include parenteral {e.g., intravenous, intraarterial, intramuscular, subcutaneous, intratumoral), oral, topical (nasal, transdermal, intradermal or intraocular), mucosal {e.g., nasal, sublingual, buccal, rectal, vaginal), inhalation, intralymphatic, intraspinal, intracranial, intraperitoneal, intratracheal, intravesical, intrathecal, enteral, intrapulmonary, intralymphatic, intracavital, intraorbital, intracapsular and transurethral, as well as local delivery by catheter or stent.

[0288] A pharmaceutical composition comprising a trispecific antibody in accordance with the present disclosure can be formulated in any pharmaceutically acceptable carrier(s) or excipient(s). As used herein, the term “pharmaceutically acceptable carrier” includes any and all solvents, dispersion media, coatings, antibacterial and antifungal agents, isotonic and absorption delaying agents, and the like that are physiologically compatible. Pharmaceutical compositions can include suitable solid or gel phase carriers or excipients. Exemplary carriers or excipients include calcium carbonate, calcium phosphate, various sugars, starches, cellulose derivatives, gelatin, and polymers such as polyethylene glycols. Exemplary pharmaceutically acceptable carriers include one or more of water, saline, phosphate buffered saline, dextrose, glycerol, ethanol and the like, as well as combinations thereof. In many cases it will be preferable to include isotonic agents, for example, sugars, polyalcohols such as mannitol, sorbitol, or sodium chloride in the composition. Pharmaceutically acceptable carriers can further comprise minor amounts of auxiliary substances such as wetting or emulsifying agents, preservatives or buffers, which enhance the shelf life or effectiveness of the therapeutic agents.

[0289] The trispecific antibody can be incorporated into a pharmaceutical composition suitable for parenteral administration. Suitable buffers include but are not limited to, sodium succinate, sodium citrate, sodium phosphate or potassium phosphate. Sodium chloride can be used to modify the toxicity of the solution at a concentration of 0-300 mM (optimally 150 mM for a liquid dosage form). Cryoprotectants can be included for a lyophilized dosage form, principally 0-10% sucrose (optimally 0.5-1.0%). Other suitable cryoprotectants include trehalose and lactose. Bulking agents can be included for a lyophilized dosage form, principally 1-10% mannitol (optimally 2-4%). Stabilizers can be used in both liquid and lyophilized dosage forms, principally 1-50 mM L-Methionine (optimally 5-10 mM). Other suitable bulking agents include glycine, arginine, can be included as 0-0.05%>polysorbate-80 (optimally 0.005-0.01%). Additional surfactants include but are not limited to polysorbate 20 and BRIJ surfactants.

[0290] Therapeutic trispecific antibody preparations can be lyophilized and stored as sterile powders, preferably under vacuum, and then reconstituted in bacteriostatic water (containing, for example, benzyl alcohol preservative) or in sterile water prior to injection. Pharmaceutical compositions can be formulated for parenteral administration by injection e.g., by bolus injection or continuous infusion.

[0291] The therapeutic agents in the pharmaceutical compositions may be formulated in a “therapeutically effective amount” or a “prophylactically effective amount”. A “therapeutically effective amount” refers to an amount effective, at dosages and for periods of time necessary, to achieve the desired therapeutic result. A therapeutically effective amount of the recombinant vector may vary depending on the condition to be treated, the severity and course of the condition, the mode of administration, whether the antibody or agent is administered for preventive or therapeutic purposes, the bioavailability of the particular agent(s), the ability of the trispecific antibody to elicit a desired response in the individual, previous therapy, the age, weight and sex of the patient, the patient's clinical history and response to the antibody, the type of the trispecific antibody used, discretion of the attending physician, etc. A therapeutically effective amount is also one in which any toxic or detrimental effects of the recombinant vector is outweighed by the therapeutically beneficial effects. A “prophylactically effective amount” refers to an amount effective, at dosages and for periods of time necessary, to achieve the desired prophylactic result.

[0292] Preferably, the polypeptide domains in the trispecific antibody are derived from the same host in which they are to be administered in order to reduce inflammatory responses against the administered therapeutic agents.

[0293] The trispecific antibody is suitably administered to the patent at one time or over a series of treatments and may be administered to the patient at any time from diagnosis onwards. The trispecific antibody may be administered as the sole treatment or in conjunction with other drugs or therapies useful in treating the condition in question.

[0294] As a general proposition, a therapeutically effective amount or prophylactically effective amount of the trispecific antibody will be administered in a range from about 1 ng/kg body weight/day to about 100 mg/kg body weight/day whether by one or more administrations. In a particular embodiment, each trispecific antibody is administered in the range of from about 1 ng/kg body weight/day to about 10 mg/kg body weight/day, about 1 ng/kg body weight/day to about 1 mg/kg body weight/day, about 1 ng/kg body weight/day to about 100 g/kg body weight/day, about 1 ng/kg body weight/day to about 10 g/kg body weight/day, about 1 ng/kg body weight/day to about 1 g/kg body weight/day, about 1 ng/kg body weight/day to about 100 ng/kg body weight/day, about 1 ng/kg body weight/day to about 10 ng/kg body weight/day, about 10 ng/kg body weight/day to about 100 mg/kg body weight/day, about 10 ng/kg body weight/day to about 10 mg/kg body weight/day, about 10 ng/kg body weight/day to about 1 mg/kg body weight/day, about 10 ng/kg body weight/day to about 100 g/kg body weight/day, about 10 ng/kg body weight/day to about 10 mg/kg body weight/day, about 10 ng/kg body weight/day to about 1 mg/kg body weight/day, 10 ng/kg body weight/day to about 100 ng/kg body weight/day, about 100 ng/kg body weight/day to about 100 mg/kg body weight/day, about 100 ng/kg body weight/day to about 10 mg/kg body weight/day, about 100 ng/kg body weight/day to about 1 mg/kg body weight/day, about 100 ng/kg body weight/day to about 100 mg/kg body weight/day, about 100 ng/kg body weight/day to about 10 mg/kg body weight/day, about 100 ng/kg body weight/day to about 1 mg/kg body weight/day, about 1 mg/kg body weight/day to about 100 mg/kg body weight/day, about 1 mg/kg body weight/day to about 10 mg/kg body weight/day, about 1 mg/kg body weight/day to about 1 mg/kg body weight/day, about 1 mg/kg body weight/day to about 100 mg/kg body weight/day, about 1 mg/kg body weight/day to about 10 mg/kg body weight/day, about 10 mg/kg body weight/day to about 100 mg/kg body weight/day, about 10 mg/kg body weight/day to about 10 mg/kg body weight/day, about 10 mg/kg body weight/day to about 1 mg/kg body weight/day, about 10 mg/kg body weight/day to about 100 mg/kg body weight/day, about 100 mg/kg body weight/day to about 100 mg/kg body weight/day, about 100 mg/kg body weight/day to about 10 mg/kg body weight/day, about 100 mg/kg body weight/day to about 1 mg/kg body weight/day, about 1 mg/kg body weight/day to about 100 mg/kg body weight/day, about 1 mg/kg body weight/day to about 10 mg/kg body weight/day, about 10 mg/kg body weight/day to about 100 mg/kg body weight/day.

[0295] In other embodiments, the trispecific antibody is administered at a dose of 500 g to 20 g every three days, or 25 mg/kg body weight every three days.

[0296] In other embodiments, each trispecific antibody is administered in the range of about 10 ng to about 100 ng per individual administration, about 10 ng to about 1 g per individual administration, about 10 ng to about 10 g per individual administration, about 10 ng to about 100 mg per individual administration, about 10 ng to about 1 mg per individual administration, about 10 ng to about 10 mg per individual administration, about 10 ng to about 100 mg per individual administration, about 10 ng to about 1000 mg per injection, about 10 ng to about 10,000 mg per individual administration, about 100 ng to about 1 mg per individual administration, about 100 ng to about 10 mg per individual administration, about 100 ng to about 100 mg per individual administration, about 100 ng to about 1 mg per individual administration, about 100 ng to about 10 mg per individual administration, about 100 ng to about 100 mg per individual administration, about 100 ng to about 1000 mg per injection, about 100 ng to about 10,000 mg per individual administration, about 1 mg to about 10 mg per individual administration, about 1 mg to about 100 mg per individual administration, about 1 mg to about 1 mg per individual administration, about 1 mg to about 10 mg per individual administration, about 1 mg to about 100 mg per individual administration, about 1 mg to about 1000 mg per injection, about 1 mg to about 10,000 mg per individual administration, about 10 mg to about 100 mg per individual administration, about 10 mg to about 1 mg per individual administration, about 10 mg to about 10 mg per individual administration, about 10 mg to about 100 mg per individual administration, about 10 mg to about 1000 mg per injection, about 10 mg to about 10,000 mg per individual administration, about 100 mg to about 1 mg per individual administration, about 100 mg to about 10 mg per individual administration, about 100 mg to about 100 mg per individual administration, about 100 mg to about 1000 mg per injection, about 100 mg to about 10,000 mg per individual administration, about 1 mg to about 10 mg per individual administration, about 1 mg to about 100 mg per individual administration, about 1 mg to about 1000 mg per injection, about 1 mg to about 10,000 mg per individual administration, about 10 mg to about 100 mg per individual administration, about 10 mg to about 1000 mg per injection, about 10 mg to about 10,000 mg per individual administration, about 100 mg to about 1000 mg per injection, about 100 mg to about 10,000 mg per individual administration and about 1000 mg to about 10,000 mg per individual administration. The trispecific antibody may be administered daily, every 2, 3, 4, 5, 6 or 7 days, or every 1, 2, 3 or 4 weeks.

[0297] In other particular embodiments, the amount of the trispecific antibody may be administered at a dose of about 0.0006 mg/day, 0.001 mg/day, 0.003 mg/day, 0.006 mg/day, 0.01 mg/day, 0.03 mg/day, 0.06 mg/day, 0.1 mg/day, 0.3 mg/day, 0.6 mg/day, 1 mg/day, 3 mg/day, 6 mg/day, 10 mg/day, 30 mg/day, 60 mg/day, 100 mg/day, 300 mg/day, 600 mg/day, 1000 mg/day, 2000 mg/day, 5000 mg/day or 10,000 mg/day. As expected, the dosage will be dependent on the condition, size, age and condition of the patient.

[0298] In certain embodiments, the coding sequences for a trispecific antibody are incorporated into a suitable expression vector (e.g., viral or non-viral vector) for expressing an effective amount of the trispecific antibody in patient with a cell proliferative disorder. In certain embodiments comprising administration of e.g., one or more recombinant AAV (rAAV) viruses, the pharmaceutical composition may comprise the rAAVs in an amount comprising at least 10¹⁰, at least 10¹¹, at least 10¹², at least 10¹³, or at least 10¹⁴ genome copies (GC) or recombinant viral particles per kg, or any range thereof. In certain embodiments, the pharmaceutical composition comprises an effective amount of the recombinant virus, such as rAAV, in an amount comprising at least 10¹⁰, at least 10¹¹, at least 10¹², at least 10¹³, at least 10¹⁴, at least 10¹⁵ genome copies or recombinant viral particles genome copies per subject, or any range thereof.

[0299] Dosages can be tested in several art-accepted animal models suitable for any particular cell proliferative disorder.

[0300] Delivery methodologies may also include the use of polycationic condensed DNA linked or unlinked to killed viruses, ligand linked DNA, liposomes, eukaryotic cell delivery vehicles cells, deposition of photopolymerized hydrogel materials, use of a handheld gene transfer particle gun, ionizing radiation, nucleic charge neutralization or fusion with cell membranes, particle mediated gene transfer and the like.

[0301] In other aspects of this embodiment, a pharmaceutical composition compound disclosed herein reduces the size of a tumor by, e.g., at least 10%, at least 15%, at least 20%, at least 25%, at least 30%, at least 35%, at least 40%, at least 45%, at least 50%, at least 55%, at least 60%, at least 65%, at least 70%, at least 75%, at least 80%, at least 85%, at least 90% or at least 95%. In yet other aspects of this embodiment, a pharmaceutical composition disclosed herein reduces the size of a tumor from, e.g., about 5% to about 100%, about 10% to about 100%, about 20% to about 100%, about 30% to about 100%, about 40% to about 100%, about 50% to about 100%, about 60% to about 100%, about 70% to about 100%, about 80% to about 100%, about 10% to about 90%, about 20% to about 90%, about 30% to about 90%, about 40% to about 90%, about 50% to about 90%, about 60% to about 90%, about 70% to about 90%, about 10% to about 80%, about 20% to about 80%, about 30% to about 80%, about 40% to about 80%, about 50% to about 80%, or about 60% to about 80%, about 10% to about 70%, about 20% to about 70%, about 30% to about 70%, about 40% to about 70%, or about 50% to about 70%.

[0302] A pharmaceutical composition disclosed herein is in an amount sufficient to allow customary administration to an individual. In aspects of this embodiment, a pharmaceutical composition disclosed herein may be, e.g., at least 5 mg, at least 10 mg, at least 15 mg, at least 20 mg, at least 25 mg, at least 30 mg, at least 35 mg, at least 40 mg, at least 45 mg, at least 50 mg, at least 55 mg, at least 60 mg, at least 65 mg, at least 70 mg, at least 75 mg, at least 80 mg, at least 85 mg, at least 90 mg, at least 95 mg, or at least 100 mg of a pharmaceutical composition. In other aspects of this embodiment, a pharmaceutical composition disclosed herein may be, e.g., at least 5 mg, at least 10 mg, at least 20 mg, at least 25 mg, at least 50 mg, at least 75 mg, at least 100 mg, at least 200 mg, at least 300 mg, at least 400 mg, at least 500 mg, at least 600 mg, at least 700 mg, at least 800 mg, at least 900 mg, at least 1,000 mg, at least 1,100 mg, at least 1,200 mg, at least 1,300 mg, at least 1,400 mg, or at least 1,500 mg of a pharmaceutical composition. In yet other aspects of this embodiment, a pharmaceutical composition disclosed herein may be in the range of, e.g., about 5 mg to about 100 mg, about 10 mg to about 100 mg, about 50 mg to about 150 mg, about 100 mg to about 250 mg, about 150 mg to about 350 mg, about 250 mg to about 500 mg, about 350 mg to about 600 mg, about 500 mg to about 750 mg, about 600 mg to about 900 mg, about 750 mg to about 1,000 mg, about 850 mg to about 1,200 mg, or about 1,000 mg to about 1,500 mg. In still other aspects of this embodiment, a pharmaceutical composition disclosed herein may be in the range of, e.g., about 10 mg to about 250 mg, about 10 mg to about 500 mg, about 10 mg to about 750 mg, about 10 mg to about 1,000 mg, about 10 mg to about 1,500 mg, about 50 mg to about 250 mg, about 50 mg to about 500 mg, about 50 mg to about 750 mg, about 50 mg to about 1,000 mg, about 50 mg to about 1,500 mg, about 100 mg to about 250 mg, about 100 mg to about 500 mg, about 100 mg to about 750 mg, about 100 mg to about 1,000 mg, about 100 mg to about 1,500 mg, about 200 mg to about 500 mg, about 200 mg to about 750 mg, about 200 mg to about 1,000 mg, about 200 mg to about 1,500 mg, about 5 mg to about 1,500 mg, about 5 mg to about 1,000 mg, or about 5 mg to about 250 mg.

[0303] A pharmaceutical composition disclosed herein may comprise a solvent, emulsion or other diluent in an amount sufficient to dissolve a pharmaceutical composition disclosed herein. In other aspects of this embodiment, a pharmaceutical composition disclosed herein may comprise a solvent, emulsion or a diluent in an amount of, e.g., less than about 90% (v/v), less than about 80% (v/v), less than about 70% (v/v), less than about 65% (v/v), less than about 60% (v/v), less than about 55% (v/v), less than about 50% (v/v), less than about 45% (v/v), less than about 40% (v/v), less than about 35% (v/v), less than about 30% (v/v), less than about 25% (v/v), less than about 20% (v/v), less than about 15% (v/v), less than about 10% (v/v), less than about 5% (v/v), or less than about 1% (v/v). In other aspects of this embodiment, a pharmaceutical composition disclosed herein may comprise a solvent, emulsion or other diluent in an amount in a range of, e.g., about 1% (v/v) to 90% (v/v), about 1% (v/v) to 70% (v/v), about 1% (v/v) to 60% (v/v), about 1% (v/v) to 50% (v/v), about 1% (v/v) to 40% (v/v), about 1% (v/v) to 30% (v/v), about 1% (v/v) to 20% (v/v), about 1% (v/v) to 10% (v/v), about 2% (v/v) to 50% (v/v), about 2% (v/v) to 40% (v/v), about 2% (v/v) to 30% (v/v), about 2% (v/v) to 20% (v/v), about 2% (v/v) to 10% (v/v), about 4% (v/v) to 50% (v/v), about 4% (v/v) to 40% (v/v), about 4% (v/v) to 30% (v/v), about 4% (v/v) to 20% (v/v), about 4% (v/v) to 10% (v/v), about 6% (v/v) to 50% (v/v), about 6% (v/v) to 40% (v/v), about 6% (v/v) to 30% (v/v), about 6% (v/v) to 20% (v/v), about 6% (v/v) to 10% (v/v), about 8% (v/v) to 50% (v/v), about 8% (v/v) to 40% (v/v), about 8% (v/v) to 30% (v/v), about 8% (v/v) to 20% (v/v), about 8% (v/v) to 15% (v/v), or about 8% (v/v) to 12% (v/v).

[0304] The final concentration of a pharmaceutical composition disclosed herein in a pharmaceutical composition disclosed herein may be of any concentration desired. In an aspect of this embodiment, the final concentration of a pharmaceutical composition in a pharmaceutical composition may be a therapeutically effective amount. In other aspects of this embodiment, the final concentration of a pharmaceutical composition in a pharmaceutical composition may be, e.g., at least 0.00001 mg/mL, at least 0.0001 mg/mL, at least 0.001 mg/mL, at least 0.01 mg/mL, at least 0.1 mg/mL, at least 1 mg/mL, at least 10 mg/mL, at least 25 mg/mL, at least 50 mg/mL, at least 100 mg/mL, at least 200 mg/mL or at least 500 mg/mL. In other aspects of this embodiment, the final concentration of a pharmaceutical composition in a pharmaceutical composition may be in a range of, e.g., about 0.00001 mg/mL to about 3,000 mg/mL, about 0.0001 mg/mL to about 3,000 mg/mL, about 0.01 mg/mL to about 3,000 mg/mL, about 0.1 mg/mL to about 3,000 mg/mL, about 1 mg/mL to about 3,000 mg/mL, about 250 mg/mL to about 3,000 mg/mL, about 500 mg/mL to about 3,000 mg/mL, about 750 mg/mL to about 3,000 mg/mL, about 1,000 mg/mL to about 3,000 mg/mL, about 100 mg/mL to about 2,000 mg/mL, about 250 mg/mL to about 2,000 mg/mL, about 500 mg/mL to about 2,000 mg/mL, about 750 mg/mL to about 2,000 mg/mL, about 1,000 mg/mL to about 2,000 mg/mL, about 100 mg/mL to about 1,500 mg/mL, about 250 mg/mL to about 1,500 mg/mL, about 500 mg/mL to about 1,500 mg/mL, about 750 mg/mL to about 1,500 mg/mL, about 1,000 mg/mL to about 1,500 mg/mL, about 100 mg/mL to about 1,200 mg/mL, about 250 mg/mL to about 1,200 mg/mL, about 500 mg/mL to about 1,200 mg/mL, about 750 mg/mL to about 1,200 mg/mL, about 1,000 mg/mL to about 1,200 mg/mL, about 100 mg/mL to about 1,000 mg/mL, about 250 mg/mL to about 1,000 mg/mL, about 500 mg/mL to about 1,000 mg/mL, about 750 mg/mL to about 1,000 mg/mL, about 100 mg/mL to about 750 mg/mL, about 250 mg/mL to about 750 mg/mL, about 500 mg/mL to about 750 mg/mL, about 100 mg/mL to about 500 mg/mL, about 250 mg/mL to about 500 mg/mL, about 0.00001 mg/mL to about 0.0001 mg/mL, about 0.00001 mg/mL to about 0.001 mg/mL, about 0.00001 mg/mL to about 0.01 mg/mL, about 0.00001 mg/mL to about 0.1 mg/mL, about 0.00001 mg/mL to about 1 mg/mL, about 0.001 mg/mL to about 0.01 mg/mL, about 0.001 mg/mL to about 0.1 mg/mL, about 0.001 mg/mL to about 1 mg/mL, about 0.001 mg/mL to about 10 mg/mL, or about 0.001 mg/mL to about 100 mg/mL.

[0305] Aspects of the present specification disclose, in part, treating an individual suffering from cancer. As used herein, the term “treating,” refers to reducing or eliminating in an individual a clinical symptom of cancer; or delaying or preventing in an individual the onset of a clinical symptom of cancer. For example, the term “treating” can mean reducing a symptom of a condition characterized by a cancer, including, but not limited to, tumor size, by, e.g., at least 20%, at least 25%, at least 30%, at least 35%, at least 40%, at least 45%, at least 50%, at least 55%, at least 60%, at least 65%, at least 70%, at least 75%, at least 80%, at least 85%, at least 90% at least 95%, or at least 100%. The actual symptoms associated with cancer are well known and can be determined by a person of ordinary skill in the art by taking into account factors, including, without limitation, the location of the cancer, the cause of the cancer, the severity of the cancer, and/or the tissue or organ affected by the cancer. Those of skill in the art will know the appropriate symptoms or indicators associated with a specific type of cancer and will know how to determine if an individual is a candidate for treatment as disclosed herein.

[0306] In another aspect, a pharmaceutical composition disclosed herein reduces the severity of a symptom of a disorder associated with a cancer. In aspects of this embodiment, a pharmaceutical composition disclosed herein reduces the severity of a symptom of a disorder associated with a cancer by, e.g., at least 10%, at least 15%, at least 20%, at least 25%, at least 30%, at least 35%, at least 40%, at least 45%, at least 50%, at least 55%, at least 60%, at least 65%, at least 70%, at least 75%, at least 80%, at least 85%, at least 90% or at least 95%. In other aspects of this embodiment, a pharmaceutical composition disclosed herein reduces the severity of a symptom of a disorder associated with a cancer by, e.g., about 10% to about 100%, about 20% to about 100%, about 30% to about 100%, about 40% to about 100%, about 50% to about 100%, about 60% to about 100%, about 70% to about 100%, about 80% to about 100%, about 10% to about 90%, about 20% to about 90%, about 30% to about 90%, about 40% to about 90%, about 50% to about 90%, about 60% to about 90%, about 70% to about 90%, about 10% to about 80%, about 20% to about 80%, about 30% to about 80%, about 40% to about 80%, about 50% to about 80%, or about 60% to about 80%, about 10% to about 70%, about 20% to about 70%, about 30% to about 70%, about 40% to about 70%, or about 50% to about 70%.

[0307] In aspects of this embodiment, a therapeutically effective amount of a pharmaceutical composition disclosed herein reduces a symptom associated with cancer by, e.g., at least 10%, at least 15%, at least 20%, at least 25%, at least 30%, at least 35%, at least 40%, at least 45%, at least 50%, at least 55%, at least 60%, at least 65%, at least 70%, at least 75%, at least 80%, at least 85%, at least 90%, at least 95% or at least 100%. In other aspects of this embodiment, a therapeutically effective amount of a pharmaceutical composition disclosed herein reduces a symptom associated with cancer by, e.g., at most 10%, at most 15%, at most 20%, at most 25%, at most 30%, at most 35%, at most 40%, at most 45%, at most 50%, at most 55%, at most 60%, at most 65%, at most 70%, at most 75%, at most 80%, at most 85%, at most 90%, at most 95% or at most 100%. In yet other aspects of this embodiment, a therapeutically effective amount of a pharmaceutical composition disclosed herein reduces a symptom associated with cancer by, e.g., about 10% to about 100%, about 10% to about 90%, about 10% to about 80%, about 10% to about 70%, about 10% to about 60%, about 10% to about 50%, about 10% to about 40%, about 20% to about 100%, about 20% to about 90%, about 20% to about 80%, about 20% to about 20%, about 20% to about 60%, about 20% to about 50%, about 20% to about 40%, about 30% to about 100%, about 30% to about 90%, about 30% to about 80%, about 30% to about 70%, about 30% to about 60%, or about 30% to about 50%.

[0308] In yet other aspects of this embodiment, a therapeutically effective amount of a pharmaceutical composition disclosed herein generally is in the range of about 0.001 mg/kg to about 100 mg/kg and administered, for example, every 3, 5, 7, 10 or 14 days. In aspects of this embodiment, an effective amount of a pharmaceutical composition disclosed herein may be, e.g., at least 0.001 mg/kg, at least 0.01 mg/kg, at least 0.1 mg/kg, at least 1.0 mg/kg, at least 5.0 mg/kg, at least 10 mg/kg, at least 15 mg/kg, at least 20 mg/kg, at least 25 mg/kg, at least 30 mg/kg, at least 35 mg/kg, at least 40 mg/kg, at least 45 mg/kg, or at least 50 mg/kg and administered, for example, every 3, 5, 7, 10 or 14 days. In other aspects of this embodiment, an effective amount of a pharmaceutical composition disclosed herein may be in the range of, e.g., about 0.001 mg/kg to about 10 mg/kg, about 0.001 mg/kg/day to about 15 mg/kg, about 0.001 mg/kg to about 20 mg/kg, about 0.001 mg/kg to about 25 mg/kg, about 0.001 mg/kg to about 30 mg/kg, about 0.001 mg/kg to about 35 mg/kg, about 0.001 mg/kg to about 40 mg/kg, about 0.001 mg/kg to about 45 mg/kg, about 0.001 mg/kg to about 50 mg/kg, about 0.001 mg/kg to about 75 mg/kg, or about 0.001 mg/kg to about 100 mg/kg and administered, for example, every 3, 5, 7, 10 or 14 days. In yet other aspects of this embodiment, an effective amount of a pharmaceutical composition disclosed herein may be in the range of, e.g., about 0.01 mg/kg to about 10 mg/kg, about 0.01 mg/kg to about 15 mg/kg, about 0.01 mg/kg to about 20 mg/kg, about 0.01 mg/kg to about 25 mg/kg, about 0.01 mg/kg to about 30 mg/kg, about 0.01 mg/kg to about 35 mg/kg, about 0.01 mg/kg to about 40 mg/kg, about 0.01 mg/kg to about 45 mg/kg, about 0.01 mg/kg to about 50 mg/kg, about 0.01 mg/kg to about 75 mg/kg, or about 0.01 mg/kg to about 100 mg/kg and administered, for example, every 3, 5, 7, 10 or 14 days. In still other aspects of this embodiment, an effective amount of a pharmaceutical composition disclosed herein may be in the range of, e.g., about 0.1 mg/kg to about 10 mg/kg, about 0.1 mg/kg to about 15 mg/kg, about 0.1 mg/kg to about 20 mg/kg, about 0.1 mg/kg to about 25 mg/kg, about 0.1 mg/kg to about 30 mg/kg, about 0.1 mg/kg to about 35 mg/kg, about 0.1 mg/kg to about 40 mg/kg, about 0.1 mg/kg to about 45 mg/kg, about 0.1 mg/kg to about 50 mg/kg, about 0.1 mg/kg to about 75 mg/kg, or about 0.1 mg/kg to about 100 mg/kg and administered, for example, every 3, 5, 7, 10 or 14 days.

[0309] Dosing can be single dosage or cumulative (serial dosing), and can be readily determined by one skilled in the art. For instance, treatment of a cancer may comprise a one-time administration of an effective dose of a pharmaceutical composition disclosed herein. Alternatively, treatment of a cancer may comprise multiple administrations of an effective dose of a pharmaceutical composition carried out over a range of time periods, such as, e.g., once daily, twice daily, trice daily, once every few days, or once weekly. The timing of administration can vary from individual to individual, depending upon such factors as the severity of an individual's symptoms. For example, an effective dose of a pharmaceutical composition disclosed herein can be administered to an individual once daily for an indefinite period of time, or until the individual no longer requires therapy. A person of ordinary skill in the art will recognize that the condition of the individual can be monitored throughout the course of treatment and that the effective amount of a pharmaceutical composition disclosed herein that is administered can be adjusted accordingly.

[0310] In one embodiment, a cancer therapeutic disclosed herein is capable of reducing the number of cancer cells or tumor size in an individual suffering from a cancer by, e.g., at least 10%, at least 15%, at least 20%, at least 25%, at least 30%, at least 35%, at least 40%, at least 45%, at least 50%, at least 55%, at least 60%, at least 65%, at least 70%, at least 75%, at least 80%, at least 85%, at least 90% or at least 95% as compared to a patient not receiving the same treatment. In other aspects of this embodiment, a cancer therapeutic is capable of reducing the number of cancer cells or tumor size in an individual suffering from a cancer by, e.g., about 10% to about 100%, about 20% to about 100%, about 30% to about 100%, about 40% to about 100%, about 50% to about 100%, about 60% to about 100%, about 70% to about 100%, about 80% to about 100%, about 10% to about 90%, about 20% to about 90%, about 30% to about 90%, about 40% to about 90%, about 50% to about 90%, about 60% to about 90%, about 70% to about 90%, about 10% to about 80%, about 20% to about 80%, about 30% to about 80%, about 40% to about 80%, about 50% to about 80%, or about 60% to about 80%, about 10% to about 70%, about 20% to about 70%, about 30% to about 70%, about 40% to about 70%, or about 50% to about 70% as compared to a patient not receiving the same treatment.

[0311] In a further embodiment, a cancer therapeutic and its derivatives have half-lives of 2 hours, 3 hours, 4 hours, 5 hours, 6 hours, 7 hours, 8 hours, 9 hours, 10 hours, 11 hours, 12 hours, 13 hours, 14 hours, 15 hours, 16 hours, 17 hours, 18 hours, 19 hours, 20 hours, 21 hours, 22 hours, 23 hours, 1 day, 2 days, 3 days, 4 days, 5 days, 6 days, 7 days, 1 week, 2 weeks, 3 weeks, 4 weeks, one month, two months, three months, four months or more.

[0312] In an embodiment, the period of administration of a cancer therapeutic is for 1 day, 2 days, 3 days, 4 days, 5 days, 6 days, 7 days, 8 days, 9 days, 10 days, 11 days, 12 days, 13 days, 14 days, 3 weeks, 4 weeks, 5 weeks, 6 weeks, 7 weeks, 8 weeks, 9 weeks, 10 weeks, 11 weeks, 12 weeks, 4 months, 5 months, 6 months, 7 months, 8 months, 9 months, 10 months, 11 months, 12 months, or more. In a further embodiment, a period of during which administration is stopped is for 1 day, 2 days, 3 days, 4 days, 5 days, 6 days, 7 days, 8 days, 9 days, 10 days, 11 days, 12 days, 13 days, 14 days, 3 weeks, 4 weeks, 5 weeks, 6 weeks, 7 weeks, 8 weeks, 9 weeks, 10 weeks, 11 weeks, 12 weeks, 4 months, 5 months, 6 months, 7 months, 8 months, 9 months, 10 months, 11 months, 12 months, or more.

[0313] In aspects of this embodiment, a therapeutically effective amount of a cancer therapeutic disclosed herein reduces or maintains a cancer cell population and/or tumor cell size in an individual by, e.g., at least 10%, at least 15%, at least 20%, at least 25%, at least 30%, at least 35%, at least 40%, at least 45%, at least 50%, at least 55%, at least 60%, at least 65%, at least 70%, at least 75%, at least 80%, at least 85%, at least 90%, at least 95% or at least 100%. In other aspects of this embodiment, a therapeutically effective amount of a cancer therapeutic disclosed herein reduces or maintains a cancer cell population and/or tumor cell size in an individual by, e.g., at most 10%, at most 15%, at most 20%, at most 25%, at most 30%, at most 35%, at most 40%, at most 45%, at most 50%, at most 55%, at most 60%, at most 65%, at most 70%, at most 75%, at most 80%, at most 85%, at most 90%, at most 95% or at most 100%. In yet other aspects of this embodiment, a therapeutically effective amount of a cancer therapeutic disclosed herein reduces or maintains a cancer cell population and/or tumor cell size in an individual by, e.g., about 10% to about 100%, about 10% to about 90%, about 10% to about 80%, about 10% to about 70%, about 10% to about 60%, about 10% to about 50%, about 10% to about 40%, about 20% to about 100%, about 20% to about 90%, about 20% to about 80%, about 20% to about 20%, about 20% to about 60%, about 20% to about 50%, about 20% to about 40%, about 30% to about 100%, about 30% to about 90%, about 30% to about 80%, about 30% to about 70%, about 30% to about 60%, or about 30% to about 50%.

[0314] A pharmaceutical composition or cancer therapeutic is administered to an individual. An individual is typically a human being, but can be an animal, including, but not limited to, dogs, cats, birds, cattle, horses, sheep, goats, reptiles and other animals, whether domesticated or not. Typically, any individual who is a candidate for treatment is a candidate with some form of cancer, whether the cancer is benign or malignant, a tumor, solid or otherwise, a cancer call not located in a tumor or some other form of cancer. Among the most common types of cancer include, but are not limited to, bladder cancer, breast cancer, colon and rectal cancer, endometrial cancer, kidney cancer, renal cancer, leukemia, lung cancer, melanoma, non-Hodgkins lymphoma, pancreatic cancer, prostate cancer, stomach cancer and thyroid cancer. Pre-operative evaluation typically includes routine history and physical examination in addition to thorough informed consent disclosing all relevant risks and benefits of the procedure.

[0315] In one aspect, a pharmaceutical composition disclosed herein reduces a symptom of a disorder associated with a cancer. In aspects of this embodiment, a pharmaceutical composition disclosed herein reduces a symptom of a disorder associated with a cancer by, e.g., at least 10%, at least 15%, at least 20%, at least 25%, at least 30%, at least 35%, at least 40%, at least 45%, at least 50%, at least 55%, at least 60%, at least 65%, at least 70%, at least 75%, at least 80%, at least 85%, at least 90% or at least 95%. In other aspects of this embodiment, a pharmaceutical composition disclosed herein reduces a symptom of a disorder associated with a cancer by, e.g., about 10% to about 100%, about 20% to about 100%, about 30% to about 100%, about 40% to about 100%, about 50% to about 100%, about 60% to about 100%, about 70% to about 100%, about 80% to about 100%, about 10% to about 90%, about 20% to about 90%, about 30% to about 90%, about 40% to about 90%, about 50% to about 90%, about 60% to about 90%, about 70% to about 90%, about 10% to about 80%, about 20% to about 80%, about 30% to about 80%, about 40% to about 80%, about 50% to about 80%, or about 60% to about 80%, about 10% to about 70%, about 20% to about 70%, about 30% to about 70%, about 40% to about 70%, or about 50% to about 70%.

[0316] In another aspect, a pharmaceutical composition disclosed herein reduces the frequency of a symptom of a disorder associated with a cancer incurred over a given time period. In aspects of this embodiment, a pharmaceutical composition disclosed herein reduces the frequency of a symptom of a disorder associated with a cancer incurred over a given time period by, e.g., at least 10%, at least 15%, at least 20%, at least 25%, at least 30%, at least 35%, at least 40%, at least 45%, at least 50%, at least 55%, at least 60%, at least 65%, at least 70%, at least 75%, at least 80%, at least 85%, at least 90% or at least 95%. In other aspects of this embodiment, a pharmaceutical composition disclosed herein reduces the frequency of a symptom of a disorder associated with a cancer incurred over a given time period by, e.g., about 10% to about 100%, about 20% to about 100%, about 30% to about 100%, about 40% to about 100%, about 50% to about 100%, about 60% to about 100%, about 70% to about 100%, about 80% to about 100%, about 10% to about 90%, about 20% to about 90%, about 30% to about 90%, about 40% to about 90%, about 50% to about 90%, about 60% to about 90%, about 70% to about 90%, about 10% to about 80%, about 20% to about 80%, about 30% to about 80%, about 40% to about 80%, about 50% to about 80%, or about 60% to about 80%, about 10% to about 70%, about 20% to about 70%, about 30% to about 70%, about 40% to about 70%, or about 50% to about 70%.

TABLE 1
DLL3 HC and LC Pairs

| Full | VH | VL | HCDR1 | HCDR2 | HDCR3 | LCDR1 | LCDR2 | LCDR3 |
|---|---|---|---|---|---|---|---|---|
| ab name | Seq ID | seq ID | Seq ID | Seq ID | Seq ID | Seq ID | Seq ID | SeqID |
| DLL3.3 | 72 | 76 | 7 | 14 | 27 | 31 | 40 | 47 |
| DLL3.4 | 73 | 77 | 1 | 11 | 22 | 32 | 39 | 54 |
| DLL3.26 | 58 | 78 | 6 | 16 | 24 | 33 | 43 | 49 |
| DLL3.27 | 65 | 78 | 5 | 16 | 24 | 33 | 43 | 49 |
| DLL3.1 | 71 | 79 | 2 | 10 | 22 | 32 | 46 | 55 |
| DLL3.2 | 73 | 79 | 1 | 11 | 22 | 32 | 46 | 55 |
| DLL3.8 | 67 | 80 | 4 | 12 | 23 | 36 | 44 | 48 |
| DLL3.9 | 64 | 81 | 3 | 13 | 28 | 32 | 46 | 54 |
| DLL3.22 | 57 | 82 | 6 | 15 | 25 | 33 | 43 | 51 |
| DLL3.23 | 59 | 82 | 6 | 16 | 25 | 33 | 43 | 51 |
| DLL3.24 | 61 | 82 | 6 | 18 | 25 | 33 | 43 | 51 |
| DLL3.25 | 63 | 82 | 6 | 16 | 25 | 33 | 43 | 51 |
| DLL3.15 | 56 | 83 | 6 | 15 | 24 | 34 | 43 | 49 |
| DLL3.5 | 58 | 83 | 6 | 16 | 24 | 34 | 43 | 49 |
| DLL3.16 | 60 | 83 | 6 | 18 | 24 | 34 | 43 | 49 |
| DLL3.17 | 62 | 83 | 6 | 16 | 24 | 34 | 43 | 49 |
| DLL3.18 | 57 | 84 | 6 | 15 | 25 | 37 | 42 | 51 |
| DLL3.19 | 59 | 84 | 6 | 16 | 25 | 37 | 42 | 51 |
| DLL3.20 | 61 | 84 | 6 | 18 | 25 | 37 | 42 | 51 |
| DLL3.21 | 63 | 84 | 6 | 16 | 25 | 37 | 42 | 51 |
| DLL3.11 | 56 | 85 | 7 | 15 | 24 | 38 | 42 | 49 |
| DLL3.12 | 58 | 85 | 6 | 16 | 24 | 38 | 42 | 49 |
| DLL3.13 | 60 | 85 | 6 | 18 | 24 | 38 | 42 | 49 |
| DLL3.14 | 62 | 85 | 6 | 16 | 24 | 38 | 42 | 49 |
| DLL3.32 | 70 | 86 | 5 | 16 | 25 | 33 | 43 | 51 |
| DLL3.33 | 70 | 86 | 5 | 16 | 25 | 33 | 43 | 51 |
| DLL3.10 | 69 | 87 | 5 | 16 | 24 | 34 | 43 | 49 |
| DLL3.31 | 69 | 87 | 5 | 16 | 24 | 34 | 43 | 49 |
| DLL3.29 | 68 | 88 | 5 | 17 | 26 | 34 | 43 | 50 |
| DLL3.30 | 68 | 88 | 5 | 17 | 26 | 34 | 43 | 50 |
| DLL3.36 | 68 | 88 | 5 | 17 | 26 | 34 | 43 | 50 |
| DLL3.34 | 74 | 89 | 8 | 19 | 23 | 35 | 45 | 52 |
| DLL3.28 | 66 | 90 | 9 | 21 | 29 | 32 | 39 | 54 |

TABLE 2
DLL3-CD3

| | Molecule | Seq ID | seq ID | seq ID |
|---|---|---|---|---|
| format | Name | chain1 | chain2 | chain3 |
| DLL3-scFv × | 3D34C | 341 | 239 | — |
| CD3-scFv | | | | |
| DLL3-scFv × | 3D35C | 342 | 239 | — |
| CD3-scFv | | | | |
| DLL3-scFv × | 3D36C | 346 | 239 | — |
| CD3-scFv | | | | |
| DLL3-scFv × | 3D36D | 343 | 239 | — |
| CD3-scFv | | | | |
| DLL3-scFv × | 3D36I | 347 | 239 | — |
| CD3-scFv | | | | |
| DLL3-scFv × | 3D36K | 348 | 239 | — |
| CD3-scFv | | | | |
| DLL3-scFv × | 3D37C | 345 | 239 | — |
| CD3-scFv | | | | |
| DLL3-scFv × | 3D44I | 344 | 239 | — |
| CD3-scFv | | | | |
| DLL3-Fab/ | 3D1 | 273 | 290 | 298 |
| CD3-scFv | | | | |
| DLL3-Fab/ | 3D10 | 273 | 292 | 296 |
| CD3-scFv | | | | |
| DLL3-Fab/ | 3D10B | 262 | 292 | 296 |
| CD3-scFv | | | | |
| DLL3-Fab/ | 3D10C | 263 | 292 | 296 |
| CD3-scFv | | | | |
| DLL3-Fab/ | 3D11B | 262 | 286 | 310 |
| CD3-scFv | | | | |
| DLL3-Fab/ | 3D11C | 263 | 286 | 310 |
| CD3-scFv | | | | |
| DLL3-Fab/ | 3D12B | 262 | 288 | 308 |
| CD3-scFv | | | | |
| DLL3-Fab/ | 3D12C | 263 | 288 | 308 |
| CD3-scFv | | | | |
| DLL3-Fab/ | 3D13B | 262 | 289 | 306 |
| CD3-scFv | | | | |
| DLL3-scFv × | 3D34-22C | 341 | 276 | 302 |
| CD3-scFv/ | | | | |
| DLL3-Fab | | | | |
| DLL3-scFv × | 3D35-22C | 342 | 276 | 302 |
| CD3-scFv/ | | | | |
| DLL3-Fab | | | | |
| DLL3-scFv × | 3D36-22C | 346 | 276 | 302 |
| CD3-scFv/ | | | | |
| DLL3-Fab | | | | |
| DLL3-scFv × | 3D37-22C | 345 | 276 | 302 |
| CD3-scFv/ | | | | |
| DLL3-Fab | | | | |
| DLL3-Fab/ | 3D13C | 263 | 289 | 306 |
| CD3-scFv | | | | |
| DLL3-scFv × | 3D45I | 347 | 276 | 297 |
| CD3-scFv/ | | | | |
| DLL3-Fab | | | | |
| DLL3-Fab/ | 3D14B | 262 | 284 | 312 |
| CD3-scFv | | | | |
| DLL3-Fab/ | 3D14C | 263 | 284 | 312 |
| CD3-scFv | | | | |
| DLL3-Fab/ | 3D15C | 263 | 287 | 309 |
| CD3-scFv | | | | |
| DLL3-Fab/ | 3D16C | 263 | 288 | 307 |
| CD3-scFv | | | | |
| DLL3-Fab/ | 3D17C | 263 | 289 | 305 |
| CD3-scFv | | | | |
| DLL3-Fab/ | 3D18C | 263 | 276 | 304 |
| CD3-scFv | | | | |
| DLL3-Fab/ | 3D19C | 263 | 274 | 304 |
| CD3-scFv | | | | |
| DLL3-Fab/ | 3D1B | 262 | 290 | 298 |
| CD3-scFv | | | | |
| DLL3-Fab/ | 3D1C | 263 | 290 | 298 |
| CD3-scFv | | | | |
| DLL3-Fab/ | 3D1I | 269 | 290 | 298 |
| CD3-scFv | | | | |
| DLL3-Fab/ | 3D20C | 263 | 278 | 304 |
| CD3-scFv | | | | |
| DLL3-Fab/ | 3D21C | 263 | 280 | 304 |
| CD3-scFv | | | | |
| DLL3-scFv × | 3DBM | Benchmark | | |
| CD3-scFv- | | CD3 × DLL3 | | |
| Fc-Fc | | | | |
| DLL3-Fab/ | 3D22C | 263 | 276 | 302 |
| CD3-scFv | | | | |
| DLL3-Fab/ | 3D22D | 264 | 276 | 302 |
| CD3-scFv | | | | |
| DLL3-Fab/ | 3D22I | 269 | 276 | 302 |
| CD3-scFv | | | | |
| DLL3-Fab/ | 3D22K | 271 | 276 | 302 |
| CD3-scFv | | | | |
| DLL3-Fab/ | 3D23C | 263 | 274 | 302 |
| CD3-scFv | | | | |
| DLL3-Fab/ | 3D24C | 263 | 278 | 302 |
| CD3-scFv | | | | |
| DLL3-Fab/ | 3D25C | 263 | 280 | 302 |
| CD3-scFv | | | | |
| DLL3-Fab/ | 3D26C | 263 | 277 | 303 |
| CD3-scFv | | | | |
| DLL3-Fab/ | 3D27C | 263 | 275 | 303 |
| CD3-scFv | | | | |
| DLL3-scFv × | 3D34-16C | 341 | 288 | 307 |
| CD3-scFv/ | | | | |
| DLL3-Fab | | | | |
| DLL3-scFv × | 3D35-16C | 342 | 288 | 307 |
| CD3-scFv/ | | | | |
| DLL3-Fab | | | | |
| DLL3-scFv × | 3D36-16C | 346 | 288 | 307 |
| CD3-scFv/ | | | | |
| DLL3-Fab | | | | |
| DLL3-scFv × | 3D37-16C | 345 | 288 | 307 |
| CD3-scFv/ | | | | |
| DLL3-Fab | | | | |
| DLL3-Fab/ | 3D28C | 263 | 279 | 303 |
| CD3-scFv | | | | |
| DLL3-Fab/ | 3D29C | 263 | 281 | 303 |
| CD3-scFv | | | | |
| DLL3-Fab/ | 3D30C | 263 | 277 | 301 |
| CD3-scFv | | | | |
| DLL3-Fab/ | 3D31C | 263 | 275 | 301 |
| CD3-scFv | | | | |
| DLL3-Fab/ | 3D32C | 263 | 279 | 301 |
| CD3-scFv | | | | |
| DLL3-Fab/ | 3D33C | 263 | 281 | 301 |
| CD3-scFv | | | | |
| DLL3-Fab/ | 3D38I | 269 | 283 | 297 |
| CD3-scFv | | | | |
| DLL3-scFv × | 3D34-1C | 341 | 290 | 298 |
| CD3-scFv/ | | | | |
| DLL3-Fab | | | | |
| DLL3-scFv × | 3D35-1C | 342 | 290 | 298 |
| CD3-scFv/ | | | | |
| DLL3-Fab | | | | |
| DLL3-scFv × | 3D36-1C | 346 | 290 | 298 |
| CD3-scFv/ | | | | |
| DLL3-Fab | | | | |
| DLL3-scFv × | 3D37-1C | 345 | 290 | 298 |
| CD3-scFv/ | | | | |
| DLL3-Fab | | | | |
| DLL3-Fab/ | 3D39I | 269 | 276 | 297 |
| CD3-scFv | | | | |
| DLL3-Fab/ | 3D4 | 273 | 291 | 295 |
| CD3-scFv | | | | |
| DLL3-Fab/ | 3D40I | 269 | 285 | 299 |
| CD3-scFv | | | | |
| DLL3-Fab/ | 3D41I | 269 | 282 | 300 |
| CD3-scFv | | | | |
| DLL3-Fab/ | 3D42I | 269 | 294 | 313 |
| CD3-scFv | | | | |
| DLL3-Fab/ | 3D43I | 269 | 293 | 311 |
| CD3-scFv | | | | |
| DLL3-Fab/ | 3D4B | 262 | 291 | 295 |
| CD3-scFv | | | | |
| DLL3-Fab/ | 3D4C | 263 | 291 | 295 |
| CD3-scFv | | | | |
| DLL3-Fab/ | 3D4D | 264 | 291 | 295 |
| CD3-scFv | | | | |
| DLL3-Fab/ | 3D4E | 265 | 291 | 295 |
| CD3-scFv | | | | |
| DLL3-Fab/ | 3D4F | 266 | 291 | 295 |
| CD3-scFv | | | | |
| DLL3-Fab/ | 3D4G | 267 | 291 | 295 |
| CD3-scFv | | | | |
| DLL3-scFv × | 3D34-4C | 341 | 291 | 295 |
| CD3-scFv/ | | | | |
| DLL3-Fab | | | | |
| DLL3-scFv × | 3D35-4C | 342 | 291 | 295 |
| CD3-scFv/ | | | | |
| DLL3-Fab | | | | |
| DLL3-scFv × | 3D36-4C | 346 | 291 | 295 |
| CD3-scFv/ | | | | |
| DLL3-Fab | | | | |
| DLL3-scFv × | 3D37-4C | 345 | 291 | 295 |
| CD3-scFv/ | | | | |
| DLL3-Fab | | | | |
| DLL3-Fab/ | 3D4H | 268 | 291 | 295 |
| CD3-scFv | | | | |
| DLL3-Fab/ | 3D4I | 269 | 291 | 295 |
| CD3-scFv | | | | |
| DLL3-Fab/ | 3D4J | 270 | 291 | 295 |
| CD3-scFv | | | | |
| DLL3-Fab/ | 3D4K | 271 | 291 | 295 |
| CD3-scFv | | | | |
| DLL3-Fab/ | 3D4L | 272 | 291 | 295 |
| CD3-scFv | | | | |
| DLL3-Fab/ | 3D7 | 273 | 292 | 298 |
| CD3-scFv | | | | |
| DLL3-scFv × | 3D34-7C | 341 | 292 | 298 |
| CD3-scFv/ | | | | |
| DLL3-Fab | | | | |

TABLE 3
DLL3-CD28

| | Molecule | Seq ID | Seq Id | seq id |
|---|---|---|---|---|
| format | Name | chain 1 | chain 2 | chain 3 |
| CD28-Fab/ | 28D1 | 425 | 426 | 431 |
| DLL3-scFv | | | | |
| CD28-Fab/ | 28D2 | 425 | 426 | 434 |
| DLL3-scFv | | | | |
| CD28-Fab/ | 28D3 | 425 | 426 | 432 |
| DLL3-scFv | | | | |
| CD28-Fab/ | 28D4 | 425 | 426 | 433 |
| DLL3-scFv | | | | |
| CD28-scFv/ | 28D9 | 427 | 290 | 298 |
| DLL3-Fab | | | | |
| CD28-scFv/ | 28D10 | 427 | 291 | 295 |
| DLL3-Fab | | | | |
| CD28-scFv/ | 28D11 | 427 | 292 | 298 |
| DLL3-Fab | | | | |
| CD28-scFv/ | 28D12 | 427 | 292 | 296 |
| DLL3-Fab | | | | |
| CD28-scFv/ | 28D13 | 428 | 291 | 295 |
| DLL3-Fab | | | | |
| CD28-scFv/ | 28D14 | 429 | 291 | 295 |
| DLL3-Fab | | | | |
| CD28-scFv/ | 28D15 | 430 | 291 | 295 |
| DLL3-Fab | | | | |
| CD28-scFv/ | 28D16 | 430 | 292 | 296 |
| DLL3-Fab | | | | |
| CD28-scFv/ | 28D17 | 430 | 276 | 302 |
| DLL3-Fab | | | | |
| CD28-scFv/ | 28D18 | 430 | 290 | 298 |
| DLL3-Fab | | | | |
| CD28-scFv/ | 28D19 | 430 | 276 | 297 |
| DLL3-Fab | | | | |

TABLE 4
DLL4-41BB

| | Molecule | Seq ID | seq ID | seq Id |
|---|---|---|---|---|
| format | Name | chain1 | chain2 | chain3 |
| 4-1BB-Fab/ | 4D1 | 437 | 438 | 431 |
| DLL3-scFv | | | | |
| 4-1BB-Fab/ | 4D2 | 437 | 438 | 434 |
| DLL3-scFv | | | | |
| 4-1BB-Fab/ | 4D3 | 437 | 438 | 432 |
| DLL3-scFv | | | | |
| 4-1BB-Fab/ | 4D4 | 437 | 438 | 433 |
| DLL3-scFv | | | | |
| 4-1BB-scFv/ | 4D5 | 441 | 291 | 295 |
| DLL3-Fab | | | | |
| 4-1BB-scFv/ | 4D6 | 442 | 291 | 295 |
| DLL3-Fab | | | | |
| 4-1BB-scFv/ | 4D7 | 445 | 291 | 295 |
| DLL3-Fab | | | | |
| 4-1BB-Fab/ | 4D8 | 437 | 438 | 466 |
| DLL3-scFv | | | | |
| 4-1BB-Fab/ | 4D9 | 437 | 438 | 467 |
| DLL3-scFv | | | | |
| 4-1BB-scFv/ | 4D10 | 446 | 291 | 295 |
| DLL3-Fab | | | | |
| 4-1BB-scFv/ | 4D11 | 447 | 291 | 295 |
| DLL3-Fab | | | | |
| 4-1BB-scFv/ | 4D12 | 448 | 291 | 295 |
| DLL3-Fab | | | | |
| 4-1BB-scFv/ | 4D13 | 444 | 291 | 295 |
| DLL3-Fab | | | | |
| 4-1BB-scFv/ | 4D14 | 443 | 290 | 298 |
| DLL3-Fab | | | | |
| DLL3-scFv/ | 4D15 | 432 | 439 | 440 |
| 4-1BB-Fab | | | | |
| DLL3scFv- | 4D16 | 468 | 439 | 440 |
| 41BBscFv-fc × | | | | |
| 41BBFab-fc | | | | |
| 4-1BBscFv- | 4D17 | 469 | 291 | 295 |
| 41BBscFv-Fc × | | | | |
| DLL3Fab-Fc | | | | |
| 41BBFab-Fc- | 4D18 | 470 | 472 | 440 |
| DLL3scFv | | | | |
| 41BBFab-Fc- | 4D19 | 471 | 473 | 298 |
| DLL3scFv | | | | |

TABLE 5
DLL3 × CD3 × CD28

| | Molecule | Seq Id | seq ID | Seq ID |
|---|---|---|---|---|
| format | Name | chain 1 | Chain 2 | chain 3 |
| CD28scFv × | 328D1 | 481 | 276 | 302 |
| CD3scFv/DLL3-Fab | | | | |
| CD28scFv × | 328D2 | 481 | 291 | 295 |
| CD3scFv/DLL3-Fab | | | | |
| CD28scFv × | 328D3 | 481 | 290 | 298 |
| CD3scFv/DLL3-Fab | | | | |
| CD28scFv × | 328D4 | 481 | 276 | 297 |
| CD3scFv/DLL3-Fab | | | | |
| DLL3scFv × | 328D5 | 343 | 425 | 426 |
| CD3scFv/CD28-Fab | | | | |

TABLE 6
DLL3 × CD3 × CD137

| | Molecule | Seq ID | Seq ID | Seq Id |
|---|---|---|---|---|
| format | Name | chain 1 | Chain2 | chain 3 |
| DLL3-scFv × | 34D1 | 343 | 437 | 438 |
| CD3scFv/4-1BB-Fab | | | | |
| DLL3-scFv × | 34D2 | 341 | 437 | 438 |
| CD3scFv/4-1BB-Fab | | | | |
| DLL3-scFv × | 34D3 | 342 | 437 | 438 |
| CD3scFv/4-1BB-Fab | | | | |
| DLL3-scFv × | 34D4 | 343 | 437 | 438 |
| CD3scFv/4-1BB-Fab | | | | |
| DLL3-scFv × | 34D5 | 346 | 439 | 440 |
| CD3scFv/4-1BB-Fab | | | | |
| DLL3-scFv × | 34D6 | 341 | 439 | 440 |
| CD3scFv/4-1BB-Fab | | | | |
| DLL3-scFv × | 34D7 | 342 | 439 | 440 |
| CD3scFv/4-1BB-Fab | | | | |
| DLL3-scFv × | 34D8 | 343 | 439 | 440 |
| CD3scFv/4-1BB-Fab | | | | |
| 4-1BBFab-Fc-CD3scFv × | 34D9 | 487 | 471 | 438 |
| 4-1BBFab-Fc-DLL3scFv | | | | |
| 4-1BB-Fab ×Fc × | 34D10 | 494 | 437 | 438 |
| CD3scFv × DLL3-scFv/ | | | | |
| 4-1BB-Fab | | | | |
| 4-1BB-Fab × Fc × | 34D11 | 495 | 472 | 440 |
| CD3scFv/4-1BB-Fab × | | | | |
| Fc × DLL3-scFv | | | | |
| 4-1BB-Fab × Fc × | 34D12 | 496 | 496 | 440 |
| CD3scFv × DLL3-scFv/ | | | | |
| 4-1BB-Fab | | | | |
| CD3-scFv × Fc × | 34D13 | 486 | 498 | 295 |
| 4-1BB-scFv/DLL3-Fab-Fc- | | | | |
| 4-1BBscFv | | | | |
| CD3-scFv × DLL3Fab- | 34D14 | 269 | 499 | 295 |
| Fc-4-1BBscFv-4-1BB-scFv | | | | |
| DLL3scFv-CD3scFv-Fc- | 34D15 | 497 | 488 | — |
| 4-1BBscFv × | | | | |
| Fc-4-1BBscFv | | | | |
| DLL3-scFv × | 34D16 | 346 | 489 | — |
| CD3scFv/Fc × | | | | |
| 4-1BB-scFv × | | | | |
| 4-1BB-scFv | | | | |

TABLE 7
MUC17 VH and VL pairs

| | VH | VL | HCDR1 | HCDR2 | HDCR3 | LCDR1 | LCDR2 | LCDR3 |
|---|---|---|---|---|---|---|---|---|
| AB Name | Seq ID | Seq ID | Seq ID | Seq ID | Seq ID | Seq ID | Seq ID | SeqID |
| Muc17.7 | 146 | 149 | 92 | 106 | 111 | 118 | 121 | 124 |
| Muc17.21 | 146 | 148 | 92 | 106 | 111 | 118 | 121 | 124 |
| Muc17.22 | 146 | 150 | 92 | 106 | 111 | 118 | 121 | 124 |
| Muc17.23 | 146 | 169 | 92 | 106 | 111 | 118 | 121 | 124 |
| Muc17.24 | 146 | 147 | 92 | 106 | 111 | 118 | 121 | 126 |
| Muc17.2 | 139 | 154 | 93 | 105 | 108 | 116 | 119 | 123 |
| Muc17.1 | 127 | 166 | 94 | 103 | 108 | 116 | 119 | 122 |
| Muc17.10 | 127 | 164 | 94 | 103 | 108 | 116 | 119 | 122 |
| Muc17.11 | 127 | 162 | 94 | 103 | 108 | 116 | 119 | 122 |
| muc17.12 | 127 | 165 | 94 | 103 | 108 | 116 | 119 | 122 |
| Muc17.13 | 127 | 161 | 94 | 103 | 108 | 116 | 119 | 122 |
| Muc17.14 | 127 | 160 | 94 | 103 | 108 | 116 | 119 | 122 |
| Muc17.25 | 140 | 163 | 94 | 103 | 108 | 116 | 119 | 122 |
| Muc17.26 | 140 | 160 | 94 | 103 | 108 | 116 | 119 | 122 |
| Muc17.27 | 140 | 153 | 94 | 103 | 108 | 116 | 119 | 122 |
| Muc17.28 | 140 | 155 | 94 | 103 | 108 | 116 | 119 | 122 |
| Muc17.29 | 129 | 163 | 94 | 103 | 108 | 116 | 119 | 122 |
| Muc17.30 | 129 | 160 | 94 | 103 | 108 | 116 | 119 | 122 |
| Muc17.31 | 129 | 153 | 94 | 103 | 108 | 116 | 119 | 122 |
| Muc17.8 | 127 | 153 | 94 | 107 | 108 | 116 | 119 | 122 |
| Muc17.9 | 127 | 163 | 94 | 103 | 108 | 116 | 119 | 122 |
| Muc17.3 | 141 | 156 | 95 | 104 | 112 | 117 | 120 | 123 |
| Muc17.15 | 145 | 159 | 97 | 101 | 109 | 115 | 119 | 125 |
| Muc17.16 | 145 | 152 | 97 | 101 | 109 | 115 | 119 | 125 |
| Muc17.17 | 128 | 152 | 96 | 99 | 109 | 115 | 119 | 125 |
| Muc17.18 | 145 | 151 | 97 | 101 | 109 | 114 | 119 | 125 |
| Muc17.19 | 145 | 167 | 97 | 101 | 109 | 114 | 119 | 125 |
| Muc17.31 | 136 | 168 | 98 | 101 | 109 | 115 | 119 | 125 |
| Muc17.32 | 135 | 168 | 97 | 101 | 109 | 115 | 119 | 125 |
| Muc17.33 | 135 | 159 | 97 | 101 | 109 | 115 | 119 | 125 |
| Muc17.34 | 135 | 152 | 97 | 101 | 109 | 115 | 119 | 125 |
| Muc17.35 | 133 | 168 | 97 | 101 | 109 | 115 | 119 | 125 |
| Muc17.20 | 131 | 157 | 97 | 100 | 110 | 115 | 119 | 125 |
| Muc17.36 | 134 | 168 | 97 | 101 | 109 | 115 | 119 | 125 |
| Muc17.37 | 132 | 168 | 97 | 101 | 109 | 115 | 119 | 125 |
| Muc17.38 | 137 | 168 | 97 | 101 | 109 | 115 | 119 | 125 |
| Muc17.39 | 144 | 152 | 97 | 99 | 109 | 115 | 119 | 125 |
| Muc17.4 | 145 | 168 | 97 | 101 | 109 | 115 | 119 | 125 |
| Muc17.40 | 144 | 168 | 97 | 99 | 109 | 115 | 119 | 125 |
| Muc17.41 | 144 | 167 | 97 | 99 | 109 | 114 | 119 | 125 |
| Muc17.42 | 143 | 152 | 96 | 101 | 109 | 115 | 119 | 125 |
| Muc17.43 | 143 | 168 | 96 | 101 | 109 | 115 | 119 | 125 |
| Muc17.44 | 143 | 167 | 96 | 101 | 109 | 114 | 119 | 125 |
| Muc17.45 | 130 | 159 | 97 | 101 | 109 | 115 | 119 | 125 |
| Muc17.46 | 142 | 167 | 96 | 99 | 109 | 114 | 119 | 125 |
| Muc17.47 | 142 | 168 | 96 | 99 | 109 | 115 | 119 | 125 |
| Muc17.48 | 136 | 159 | 97 | 101 | 109 | 115 | 119 | 125 |
| Muc17.5 | 131 | 159 | 97 | 100 | 110 | 115 | 119 | 125 |
| Muc17.49 | 136 | 152 | 97 | 101 | 109 | 115 | 119 | 125 |

TABLE 8
MUC17 VH × CD3

| | Molecule | SEQ ID | SEQ ID | SEQ ID |
|---|---|---|---|---|
| format | Name | Chain1 | Chain2 | Chain3 |
| Muc17-Fab/CD3-scFv | 3M23C | 263 | 379 | 387 |
| Muc17-Fab/CD3-scFv | 3M24C | 263 | 379 | 388 |
| Muc17-Fab/CD3-scFv | 3M25C | 263 | 372 | 390 |
| Muc17-Fab/CD3-scFv | 3M26C | 263 | 372 | 389 |
| Muc17-Fab/CD3-scFv | 3M27C | 263 | 377 | 390 |
| Muc17-Fab/CD3-scFv | 3M28C | 263 | 371 | 390 |
| Muc17-Fab/CD3-scFv | 3M29C | 263 | 368 | 382 |
| Muc17-scFv × | 3M2C2 | 352 | | |
| CD3-scFv-scfc | | | | |
| Muc17-Fab/CD3-scFv | 3M30C | 263 | 368 | 383 |
| Muc17-Fab/CD3-scFv | 3M31C | 263 | 368 | 385 |
| Muc17-Fab/CD3-scFv | 3M32C | 263 | 368 | 384 |
| Muc17-Fab/CD3-scFv | 3M33C | 263 | 368 | 381 |
| Muc17-Fab/CD3-scFv | 3M34C | 263 | 370 | 394 |
| Muc17-Fab/CD3-scFv | 3M35C | 263 | 370 | 391 |
| Muc17-Fab/CD3-scFv | 3M36C | 263 | 370 | 387 |
| Muc17-Fab/CD3-scFv | 3M37C | 263 | 369 | 394 |
| Muc17-Fab/CD3-scFv | 3M38C | 263 | 369 | 391 |
| Muc17-Fab/CD3-scFv | 3M39C | 263 | 369 | 387 |
| Muc17-Fab/CD3-scFv | 3M40C | 263 | 379 | 394 |
| Muc17-Fab/CD3-scFv | 3M41C | 263 | 379 | 391 |
| Muc17-Fab/CD3-scFv | 3M42C | 263 | 379 | 387 |
| Muc17-Fab/CD3-scFv | 3M43C | 263 | 376 | 399 |
| Muc17-Fab/CD3-scFv | 3M44C | 263 | 376 | 386 |
| Muc17-Fab/CD3-scFv | 3M45C | 263 | 376 | 390 |
| Muc17-Fab/CD3-scFv | 3M46C | 263 | 380 | 399 |
| Muc17-Fab/CD3-scFv | 3M47C | 263 | 380 | 386 |
| Muc17-Fab/CD3-scFv | 3M48C | 263 | 380 | 390 |
| Muc17-Fab/CD3-scFv | 3M49C | 263 | 377 | 399 |
| Muc17-Fab/CD3-scFv | 3M50C | 263 | 377 | 386 |
| Muc17-Fab/CD3-scFv | 3M51C | 263 | 377 | 390 |
| Muc17-Fab/CD3-scFv | 3M52C | 263 | 369 | 397 |
| Muc17-Fab/CD3-scFv | 3M53C | 263 | 369 | 392 |
| Muc17-Fab/CD3-scFv | 3M54C | 263 | 369 | 396 |
| Muc17-Fab/CD3-scFv | 3M55C | 263 | 369 | 398 |
| Muc17-scFv/CD3-Fab | 3M55D | 264 | 369 | 400 |
| Muc17-scFv/CD3-Fab | 3M55I | 269 | 369 | 400 |
| Muc17-scFv/CD3-Fab | 3M55K | 271 | 369 | 400 |
| Muc17-Fab/CD3-scFv | 3M56C | 263 | 374 | 399 |
| Muc17-Fab/CD3-scFv | 3M57C | 263 | 375 | 399 |
| Muc17-Fab/CD3-scFv | 3M58C | 263 | 373 | 399 |
| Muc17-Fab/CD3-scFv | 3M59C | 263 | 378 | 399 |
| Muc17-Fab/CD3-scFv | 3M60C | 263 | 369 | 393 |
| Muc17-scFv × CD3- | 3M61C | 350 | 239 | |
| scFv | | | | |
| Muc17-scFv × CD3- | 3M62C | 363 | 239 | |
| scFv | | | | |
| Muc17-scFv × CD3- | 3M62D | 362 | 239 | |
| scFv | | | | |
| Muc17-scFv × CD3- | 3M62I | 364 | 239 | |
| scFv | | | | |
| Muc17-scFv × CD3- | 3M62K | 365 | 239 | |
| scFv | | | | |
| Muc17-scFv × CD3- | 3M63C | 350 | 380 | 399 |
| scFv/Muc17-Fab | | | | |
| Muc17-scFv × | 3M64C | 363 | 369 | 398 |
| CD3-scFv/Muc17-Fab | | | | |
| Muc17-scFv/CD3-Fab | 3M65C | 366 | 263 | 400 |
| Muc17-scFv/CD3-Fab | 3M66C | 367 | 263 | 400 |
| Muc17-scFv × CD3- | 3M67I | 349 | 239 | |
| scFv | | | | |
| Muc17-scFv × CD3- | 3M68I | 354 | 239 | |
| scFv | | | | |
| Muc17-scFv × CD3- | 3M8B7 | 351 | | |
| scFv-scfc | | | | |
| 1MU32scFv - | | 361 | 239 | |
| CD3scFv - Fc | | | | |
| 1MU8AscFv - | | 353 | 239 | |
| CD3scFv - Fc | | | | |
| 1MU32scFv(Y32F) - | | 360 | 239 | |
| CD3scFv - Fc | | | | |
| 1MU32scFv(M34L) - | | 357 | 239 | |
| CD3scFv - Fc | | | | |
| 1MU32scFv(T58S) - | | 359 | 239 | |
| CD3scFv - Fc | | | | |

TABLE 9
MUC17 × CD28

| | Molecule | SeqID | SeqID | SeqID |
|---|---|---|---|---|
| format | Name | Chain1 | Chain2 | Chain3 |
| Muc17-Fab/ | 28M1 | 427 | 368 | 384 |
| CD28-scFv | | | | |
| Muc17-Fab/ | 28M2 | 427 | 380 | 399 |
| CD28-scFv | | | | |
| Muc17-Fab/ | 28M3 | 427 | 369 | 398 |
| CD28-scFv | | | | |
| Muc17-Fab/ | 28M4 | 430 | 368 | 384 |
| CD28-scFv | | | | |
| Muc17-Fab/ | 28M5 | 430 | 380 | 399 |
| CD28-scFv | | | | |
| Muc17-Fab/ | 28M6 | 430 | 369 | 398 |
| CD28-scFv | | | | |

TABLE 10
MUC17 × 41BB

| | Molecule | Seq ID | seq ID | seq Id |
|---|---|---|---|---|
| format | Name | chain1 | chain2 | chain3 |
| Muc17-scfv/ | 4M1 | 366 | 437 | 438 |
| 4-1BB-Fab | | | | |
| Muc17-scfv/ | 4M2 | 367 | 437 | 438 |
| 4-1BB-Fab | | | | |
| Muc17-scfv/ | 4M3 | 474 | 437 | 438 |
| 4-1BB-Fab | | | | |
| 4-1BB-scFv/ | 4M4 | 451 | 369 | 398 |
| Muc17-Fab | | | | |
| 4-1BB-scFv/ | 4M5 | 545 | 369 | 398 |
| Muc17-Fab | | | | |
| 4-1BB-scFv/ | 4M6 | 450 | 369 | 398 |
| Muc17-Fab | | | | |
| 4-1BB-scFv/ | 4M7 | 451 | 380 | 399 |
| Muc17-Fab | | | | |
| 4-1BB-scFv/ | 4M8 | 452 | 380 | 399 |
| Muc17-Fab | | | | |
| 4-1BB-scFv/ | 4M9 | 453 | 369 | 398 |
| Muc17-Fab | | | | |
| 4-1BB-scFv/ | 4M10 | 447 | 369 | 398 |
| Muc17-Fab | | | | |
| 4-1BB-scFv/ | 4M11 | 448 | 369 | 398 |
| Muc17-Fab | | | | |
| 4-1BB-scFv/ | 4M12 | 444 | 369 | 398 |
| Muc17-Fab | | | | |
| 4-1BB-scFv/ | 4M13 | 443 | 369 | 398 |
| Muc17-Fab | | | | |
| 4-1BB-scFv/ | 4M14 | 452 | 380 | 399 |
| Muc17-Fab | | | | |
| 4-1BB-scFv/ | 4M15 | 453 | 380 | 399 |
| Muc17-Fab | | | | |

TABLE 11
MUC17 × CD3 × CD28

| | Molecule | Seq Id | seq ID | Seq ID |
|---|---|---|---|---|
| format | Name | chain 1 | Chain 2 | chain 3 |
| CD3-scFv × | 328M1 | 480 | 369 | 398 |
| CD28-scFv/Muc17-Fab | | | | |
| CD28-scFv × | 328M2 | 481 | 369 | 398 |
| CD3-scFv/Muc17-Fab | | | | |
| CD28-scFv × | 328M3 | 481 | 380 | 399 |
| CD3-scFv/Muc17-Fab | | | | |
| CD28-scFv × | 328M4 | 481 | 368 | 384 |
| CD3-scFv/Muc17-Fab | | | | |
| Muc17-scFv × | 328M5 | 362 | 482 | 483 |
| CD3-scFv/CD28-Fab | | | | |

TABLE 12
MUC17 × CD3 × CD137

| | Molecule | Seq Id | seq ID | Seq ID |
|---|---|---|---|---|
| format | Name | chain 1 | Chain 2 | chain 3 |
| Muc17-scFv × | 34M1 | 362 | 437 | 438 |
| CD3-scFv/4-1BB-Fab | | | | |
| 4-1BB-scFv × | 34M2 | 486 | 380 | 399 |
| CD3-scFv/Muc17-Fab | | | | |
| 4-1BB-scFv × | 34M3 | 484 | 380 | 399 |
| CD3-scFv/Muc17-Fab | | | | |
| Muc17-scFv × | 34M4 | 362 | 439 | 440 |
| CD3-scFv/4-1BB-Fab | | | | |

TABLE 13
CLDN18.2 VH and HL pairs

| | VH | VL | HCDR1 | HCDR2 | HDCR3 | LCDR1 | LCDR2 | LCDR3 |
|---|---|---|---|---|---|---|---|---|
| AB Name | SeqID | SeqID | Seq ID | Seq ID | SeqID | Seq ID | Seq ID | SeqID |
| CLDN182.1 | 203 | 208 | 175 | 180 | 186 | 188 | 191 | 195 |
| CLDN182.2 | 202 | 207 | 174 | 179 | 187 | 188 | 191 | 194 |
| CLDN182.3 | 198 | 209 | 170 | 181 | 185 | 188 | 191 | 196 |
| CLDN182.7 | 198 | 207 | 170 | 181 | 185 | 188 | 191 | 196 |
| cldn18.2.4 | 201 | 212 | 173 | 176 | 182 | 190 | 191 | 193 |
| CLDN18.8 | 201 | 211 | 173 | 176 | 182 | 190 | 191 | 193 |
| CLDN182.5 | 204 | 210 | 171 | 177 | 184 | 189 | 191 | 192 |
| CLDN182.6 | 206 | 206 | 172 | 178 | 183 | 188 | 191 | 192 |
| CLDN182.9 | 206 | 213 | 172 | 178 | 183 | 188 | 191 | 192 |
| CLDN182.10 | 200 | 212 | 173 | 176 | 182 | 190 | 191 | 193 |
| CLDN182.11 | 200 | 211 | 173 | 176 | 182 | 190 | 191 | 193 |
| CLDN182.12 | 197 | 209 | 170 | 181 | 185 | 188 | 191 | 196 |
| CLDN182.13 | 197 | 207 | 170 | 181 | 185 | 188 | 191 | 196 |
| CLDN182.14 | 199 | 207 | 174 | 179 | 187 | 188 | 191 | 194 |
| CLDN182.15 | 205 | 206 | 172 | 178 | 183 | 188 | 191 | 192 |
| CLDN182.16 | 205 | 213 | 172 | 178 | 183 | 188 | 191 | 192 |

TABLE 14
CLDN18.2 × CD3

| | Molecule | SEQID | SEQID | SEQID |
|---|---|---|---|---|
| format | Name | Chain 1 | Chain 2 | Chain 3 |
| Cldn-Fab/ | 3C17C | 263 | 407 | 414 |
| CD3-scFv | | | | |
| Cldn-Fab/ | 3C18C | 263 | 405 | 418 |
| CD3-scFv | | | | |
| Cldn-Fab/ | 3C19C | 263 | 405 | 417 |
| CD3-scFv | | | | |
| Cldn-Fab/ | 3C20C | 263 | 404 | 418 |
| CD3-scFv | | | | |
| Cldn-Fab/ | 3C21C | 263 | 404 | 417 |
| CD3-scFv | | | | |
| Cldn-Fab/ | 3C22C | 263 | 402 | 415 |
| CD3-scFv | | | | |
| Cldn-Fab/ | 3C23C | 263 | 402 | 411 |
| CD3-scFv | | | | |
| Cldn-Fab/ | 3C24C | 263 | 401 | 415 |
| CD3-scFv | | | | |
| Cldn-Fab/ | 3C25C | 263 | 401 | 411 |
| CD3-scFv | | | | |
| Cldn-Fab/ | 3C26C | 263 | 408 | 416 |
| CD3-scFv | | | | |
| Cldn-Fab/ | 3C27C | 263 | 406 | 413 |
| CD3-scFv | | | | |
| Cldn-Fab/ | 3C28C | 263 | 403 | 413 |
| CD3-scFv | | | | |
| Cldn-Fab/ | 3C29C | 263 | 410 | 412 |
| CD3-scFv | | | | |
| Cldn-Fab/ | 3C30C | 263 | 410 | 419 |
| CD3-scFv | | | | |
| Cldn-Fab/ | 3C31C | 263 | 409 | 412 |
| CD3-scFv | | | | |
| Cldn-Fab/ | 3C32C | 263 | 409 | 419 |
| CD3-scFv | | | | |
| Cldn-Fab/ | 3C18D | 264 | 405 | 418 |
| CD3-scFv | | | | |
| Cldn-Fab/ | 3C18I | 269 | 405 | 418 |
| CD3-scFv | | | | |
| Cldn-Fab/ | 3C18K | 271 | 405 | 418 |
| CD3-scFv | | | | |
| Cldn-Fab/ | 3C22D | 264 | 402 | 415 |
| CD3-scFv | | | | |
| Cldn-Fab/ | 3C22I | 269 | 402 | 415 |
| CD3-scFv | | | | |
| Cldn-Fab/ | 3C22K | 271 | 402 | 415 |
| CD3-scFv | | | | |
| Cldn-Fab/ | 3C26D | 264 | 408 | 416 |
| CD3-scFv | | | | |
| Cldn-Fab/ | 3C26I | 269 | 408 | 416 |
| CD3-scFv | | | | |
| Cldn-Fab/ | 3C26K | 271 | 408 | 416 |
| CD3-scFv | | | | |
| Cldn-Fab/ | 3C27D | 264 | 406 | 413 |
| CD3-scFv | | | | |
| Cldn-Fab/ | 3C27I | 269 | 406 | 413 |
| CD3-scFv | | | | |
| Cldn-Fab/ | 3C27K | 271 | 406 | 413 |
| CD3-scFv | | | | |
| CLDN-scFv × | 3CBM | | | |
| CD3-scFv-scfc | | | | |

TABLE 15
CLDN18.2 × CD28

| | Molecule | SeqID | SeqID | SeqID |
|---|---|---|---|---|
| format | Name | Chain1 | Chain2 | Chain3 |
| Cldn-Fab/ | 28C1 | 427 | 405 | 418 |
| CD28-scFv | | | | |
| Cldn-Fab/ | 28C2 | 427 | 402 | 415 |
| CD28-scFv | | | | |
| Cldn-Fab/ | 28C3 | 427 | 408 | 416 |
| CD28-scFv | | | | |
| Cldn-Fab/ | 28C4 | 427 | 406 | 413 |
| CD28-scFv | | | | |
| Cldn-Fab/ | 28C5 | 430 | 405 | 418 |
| CD28-scFv | | | | |
| Cldn-Fab/ | 28C6 | 430 | 402 | 415 |
| CD28-scFv | | | | |
| Cldn-Fab/ | 28C7 | 430 | 408 | 416 |
| CD28-scFv | | | | |
| Cldn-Fab/ | 28C8 | 430 | 406 | 413 |
| CD28-scFv | | | | |
| Cldn-Fab/ | 28C9 | 435 | 408 | 416 |
| CD28-scFv | | | | |
| Cldn-Fab/ | 28C10 | 436 | 408 | 416 |
| CD28-scFv | | | | |

TABLE 16
CLDN18.2 × 41BB

| | Molecule | SeqID | SeqID | SeqID |
|---|---|---|---|---|
| format | Name | chain 1 | chain 2 | chain 3 |
| Cldn-scfv/ | 4C1 | 475 | 437 | 438 |
| 4-1BB-Fab | | | | |
| Cldn-scfv/ | 4C2 | 476 | 437 | 438 |
| 4-1BB-Fab | | | | |
| Cldn-scfv/ | 4C3 | 477 | 437 | 438 |
| 4-1BB-Fab | | | | |
| Cldn-scfv/ | 4C4 | 478 | 437 | 438 |
| 4-1BB-Fab | | | | |
| Cldn-Fab/ | 4C5 | 451 | 405 | 418 |
| 4-1BB-scFv | | | | |
| Cldn-Fab/ | 4C6 | 454 | 405 | 418 |
| 4-1BB-scFv | | | | |
| Cldn-Fab/ | 4C7 | 451 | 408 | 416 |
| 4-1BB-scFv | | | | |
| Cldn-Fab/ | 4C8 | 459 | 408 | 416 |
| 4-1BB-scFv | | | | |
| Cldn-Fab/ | 4C9 | 479 | 408 | 416 |
| 4-1BB-scFv | | | | |
| Cldn-Fab/ | 4C10 | 464 | 408 | 416 |
| 4-1BB-scFv | | | | |
| Cldn-Fab/ | 4C11 | 460 | 408 | 416 |
| 4-1BB-scFv | | | | |
| Cldn-Fab/ | 4C12 | 463 | 408 | 416 |
| 4-1BB-scFv | | | | |
| Cldn-Fab/ | 4C13 | 465 | 408 | 416 |
| 4-1BB-scFv | | | | |
| Cldn-Fab/ | 4C14 | 461 | 408 | 416 |
| 4-1BB-scFv | | | | |
| Cldn-Fab/ | 4C15 | 454 | 408 | 416 |
| 4-1BB-scFv | | | | |
| Cldn-Fab/ | 4C16 | 457 | 408 | 416 |
| 4-1BB-scFv | | | | |
| Cldn-Fab/ | 4C17 | 455 | 408 | 416 |
| 4-1BB-scFv | | | | |
| Cldn-Fab/ | 4C18 | 458 | 408 | 416 |
| 4-1BB-scFv | | | | |
| Cldn-Fab/ | 4C19 | 456 | 408 | 416 |
| 4-1BB-scFv | | | | |

TABLE 17
CLDN18.2 × CD3 × CD28

| | Molecule | Seq ID | seq ID | seq Id |
|---|---|---|---|---|
| format | Name | chain1 | chain2 | chain3 |
| CD3-scFv × | 328C1 | 481 | 405 | 418 |
| CD28-scFv/Cldn-Fab | | | | |
| CD3-scFv × | 328C2 | 481 | 402 | 415 |
| CD28-scFv/Cldn-Fab | | | | |
| CD3-scFv × | 328C3 | 481 | 408 | 416 |
| CD28-scFv/Cldn-Fab | | | | |
| CD3-scFv × | 328C4 | 481 | 406 | 413 |
| CD28-scFv/Cldn-Fab | | | | |

TABLE 18
CLDN18.2 × CD3 × CD137

| | Molecule | Seq ID | seq ID | seq Id |
|---|---|---|---|---|
| format | Name | chain1 | chain2 | chain3 |
| CD3-scFv × | 34C1 | 491 | 405 | 418 |
| 4-1BB-scFv/Cldn-Fab | | | | |
| CD3-scFv × | 34C2 | 490 | 405 | 418 |
| 4-1BB-scFv/Cldn-Fab | | | | |
| 4-1BB-scFv × | 34C3 | 486 | 405 | 418 |
| CD3-scFv/Cldn-Fab | | | | |
| 4-1BB-scFv × | 34C4 | 484 | 405 | 418 |
| CD3-scFv/Cldn-Fab | | | | |
| Cldn-scFv × | 34C5 | 492 | 437 | 438 |
| CD3-scFv/4-1BB-Fab | | | | |
| Cldn-scFv × | 34C6 | 493 | 437 | 438 |
| CD3-scFv/4-1BB-Fab | | | | |
| Cldn-scFv × | 34C7 | 492 | 439 | 440 |
| CD3-scFv/4-1BB-Fab | | | | |
| Cldn-scFv × | 34C8 | 493 | 439 | 440 |
| CD3-scFv/4-1BB-Fab | | | | |

TABLE 19
CLDN18.2 × CD28 × CD137

| | Molecule | Seq ID | seq ID | seq Id |
|---|---|---|---|---|
| format | Name | chain1 | chain2 | chain3 |
| CD28-scFv × | 284C1 | 500 | 405 | 418 |
| 4-1BB-scFv/Cldn-Fab | | | | |
| CD28-scFv × | 284C2 | 501 | 405 | 418 |
| 4-1BB-scFv/Cldn-Fab | | | | |
| 4-1BB-scFv × | 284C3 | 502 | 405 | 418 |
| CD28-scFv/Cldn-Fab | | | | |
| 4-1BB-scFv × | 284C4 | 503 | 405 | 418 |
| CD28-scFv/Cldn-Fab | | | | |

### EXAMPLES

[0317] The compositions and methods described herein will be further understood by reference to the following examples, which are intended to be purely exemplary. The compositions and methods described herein are not limited in scope by the exemplified embodiments, which are intended as illustrations of single aspects only. Any methods that are functionally equivalent are within the scope of the invention. Various modifications of the compositions and methods described herein in addition to those expressly described herein will become apparent to those skilled in the art from the foregoing description and accompanying figures. Such modifications fall within the scope of the invention.

### Example 1

### Humanized Anti-DLL3 Antibodies Binding to Human and Cynomolgus DLL3 Expressing CHO Cells

[0318] To evaluate the ability of anti-DLL3 antibodies to bind, human serial dilutions of the anti-DLL3 antibodies were added to CHO-K1 cells (20,000 cells/well) over-expressing human or cyno DLL3. The mixtures were incubated at 4° C. for 20 minutes, washed 3 times, and stained with the secondary antibody, PE labeled F(ab′)2-Goat anti-human IgG Fc (Thermo H10104) at 4° C. for 20 minutes. Cells were washed and resuspended in 7-Amino-Actinomycin D (7-AAD) solution and fixed in 10% neutral buffered formalin solution for 15 minutes before analysis with the iQue Intellicyt system. FIG. 2A is a graph of the concentration (nM) versus the mean fluorescence intensity.

[0319] Four humanized antibodies were used in this example (DLL3.1, DLL3.2, DLL3.3, DLL3.4). The experiment was repeated with cynomolgus monkey DLL3 expressing CHO cells. FIG. 2B is a graph of the concentration (nM) of the antibodies versus the mean fluorescence intensity for binding to the cells.

### Example 2

[0320] Anti-DLL3scfv-Fc Binding to huDLL3 Expressing CHO Cells

[0321] The experiment was repeated to evaluate the ability of anti-DLL3scfv-Fc antibody fragment to bind human DLL3. FIG. 3 is a graph of the concentration (nM) of the DLL3 molecules versus the mean fluorescence intensity for binding to the cells. Six antibody fragments were used in this example (DLL3.1 VH-VL, DLL3.2 VH-VL, DLL3.3 VH-VL, DLL3.4 VH-VL, DLL3.1 VL-VH and DLL3.4 VL-VH).

### Example 3

[0322] CD28scfv-CD3scFv-Fc×DLL3-Fab-Fc Trispecific Molecule 328D3 Activates PBMCs to Secrete IFN Gamma in the Presence of CHO-DLL3 Cells to Higher Levels than the CD3scfv-Fc×DLL3Fab-Fc Bispecific Molecule 3D1I or CD28scfv-Fc×DLL3Fab-Fc Bispecific Molecule 28D18

[0323] FIG. 4 is a graph of concentration (nM) of the molecules versus the IFNgamma as detected by ELISA (absorbance at 650 nm). The ELISA utilized high protein-binding 96-well plates that were coated overnight with 50 uL of mouse anti-human IFNgamma capture antibody at a concentration of 2 μg/ml. Plates were washed with PBS+0.05% Tween-20 (PBST) and blocked with 200 uL PBS with 1% BSA. After washing, the coated plates were incubated for 120 minutes with 50 uL of the supernatant from the PBMC:Target cell cultures stimulated with the molecules. Plates were washed, and then incubated for 60 minutes with 50 uL of biotinylated mouse anti-human IFNgamma detection antibody at a concentration of 0.5 μg/ml. Plates were washed and incubated with streptavidin-HRP for 20 minutes. After washing, captured IFNgamma was quantified using 3,3′,5,5′-tetramethylbenzidine (TMB)

### Example 4

[0324] CD28scfv-CD3scFv-Fc×DLL3-Fab-Fc Trispecific Molecule 328D2 Activates PBMCs to Secrete IFNgamma in the Presence of CHO-DLL3 Cells to Higher Levels than the CD3scfv-Fc×DLL3Fab-Fc Bispecific Molecule 3041 or CD28scfv-Fc×DLL3Fab-Fc Bispecific Molecule 28D15

[0325] FIG. 5 is a graph of concentration (nM) of the molecules versus the IFNg (absorbance at 650 nm) as detected by ELISA as described in Example 3.

### Example 5

[0326] CD28scfv-CD3scFv-Fc×DLL3-Fab-Fc Trispecific Molecule 328D1 Activates PBMCs to Secrete IFNgamma in the Presence of CHO-DLL3 Cells to Higher Levels than the CD3scfv-Fc×DLL3Fab-Fc Bispecific Molecule 3D22I or CD28scfv-Fc×DLL3Fab-Fc Bispecific Molecule 28017.

[0327] FIG. 6 is a graph of concentration (nM) of the molecules versus the IFNg (absorbance at 650 nm) as detected by ELISA as described in Example 3.

### Example 6

[0328] CD28 scfv-CD3scFv-Fc×DLL3-Fab-Fc Trispecific Molecules 328D4 and 328D5 Activate PBMCs to Secrete More IL-2 in the Presence of NCI-H82 Cells Greater than the CD3scfv-Fc×DLL3Fab-Fc Bispecific, 3D39I

[0329] FIG. 7 is a graph of concentration (nM) versus the IFNg (absorbance at 650 nm). After 48 hours of culture, T cell activation was measured as an increase in IL-2 secreted into the medium. IL-2 secretion was measured using an IL-2 ELISA. The ELISA utilized high protein-binding 96-well plates that were coated overnight with 50 μL of mouse anti-human IL-2 capture antibody at a concentration of 2 μg/ml. Plates were washed with PBS+0.05% Tween-20 (PBST) and blocked with 200 μL PBS with 1% BSA. After washing, the coated plates were incubated for 120 minutes with 50 μL of the supernatant from the PBMC:Target cell cultures stimulated with bispecific molecules. Plates were washed, and then incubated for 60 minutes with 50 μL of biotinylated mouse anti-human IL-2 detection antibody at a concentration of 0.5 μg/ml. Plates were washed and incubated with streptavidin-HRP for 20 minutes. After washing, captured IL-2 was quantified using 3,3′,5,5′-tetramethylbenzidine (TMB).

### Example 7

### MUC17×CD3 Bispecifics Bind Muc17-CHOK1 and ASPC1 Cells

[0330] Seven humanized antibodies, 1MU11A, 1MU32A, 1MU36A, 1MU16A, 1MU37A, 1MU43A, and 1MU47A, were assessed for the ability to bind to CHO-K1 cells expressing the membrane proximal fragment of MUC17.

[0331] To evaluate the ability of anti-MUC17 antibodies to bind cell expressed MUC17, serial dilutions of the anti-MUC17 antibodies were added to the MUC17 expressing CHO-K1 cells at a concentration of 20,000 cells/well. The antibody:cell mixtures were incubated at 4° C. for 20 minutes, washed 3 times, and stained with the secondary antibody, PE labeled F(ab′)2-Goat anti-human IgG Fc (Thermo H10104) at 4° C. for 20 minutes. Cells were washed and resuspended in 7-Amino-Actinomycin D (7-AAD) solution and fixed in 10% neutral buffered formalin solution for 15 minutes before analysis with the iQue Intellicyt system. FIG. 11A is a graph of the concentration (nM) versus the mean fluorescence intensity (MFI) of binding to MUC17-CHO cells.

[0332] The experiment was repeated with APSC1 cells, which endogenously express full length human MUC17. FIG. 11B shows a graph of the concentration (nM) versus the mean fluorescence intensity (MFI) for the antibodies binding to the ASPC1 cells.

### Example 8

[0333] hu1MU11A and hu1MU32A Retain Muc17 Binding Activity in the Scfv Format

[0334] FIG. 12 is a graph of concentration (nM) of the Fab-Fc and Scfv-Fc versions of the molecules versus absorbance at 650 nm for binding to MUC17.

### Example 9

[0335] CD3×CD28×Muc17 Trispecific Molecules have Similar Maximum Killing of ASPC1 Cells by PBMCs as the CD3 Bispecific 3M62I

[0336] The experiment was conducted to evaluate the ability of human peripheral mononuclear (PBMCs) effector cells to kill Muc17 expressing CHO target cells when stimulated by MUC17×CD3×CD28 trispecific molecules. Cell cytotoxicity was determined as the amount of lactate dehydrogenase (LDH) released from damaged cells as a percent of the total LDH release with 1% Triton-X (Max Killing) added to the cell mixtures at time 0. For the cytotoxicity assays, target (MUC17-CHO or ASPC1) and effector cells (human PBMCs) were suspended in 200 ul of medium containing 10% serum at an effector to target ratio of 10:1, in a 96-well plate. Dilutions of the bispecific molecules were added to the cultures in triplicate. The 96-well plates were cultured at 37° C. for 48 hours. The cells were then centrifuged at 250×g for 10 min, and 100 μl of the supernatant plus were transferred into corresponding wells of an optically clear 96-well plate containing 100 μl LDH assay reagent per well. The plates were then incubated for up to 30 min at room temperature. The absorbance of all samples was measured at 490-500 nm using a microtiter plate reader. FIG. 13 is a graph of the concentration (nM) of the molecules versus % of maximum killing.

### Example 10

[0337] Muc17×CD3×cD28 Trispecific molecules 328M2, 328M 3, 328M 4, and 328M 5 activate PBMCs in the presence of ASPC1 cells to secrete IL-2 at levels higher than that of the CD3 bispecific, 3M62I

[0338] FIG. 14 is a graph of concentration (nM) of the molecules versus absorbance at 650 nm from the ELISA to detect secreted IL-2 in the media as described in Example 6.

### Example 11

[0339] CD3Scfv×CD28SScfv×MUC17-Fab trispecific molecules 328M1 and 328M2 activate T-cells to kill MUC17-CHO cells better than the CD3 bispecific 3M55I, and similar to the combination of CD3 and CD28 bispecifics, 3M55I+28M3. FIG. 15 is a graph of the concentration (nM) of the molecules versus % of maximum killing.

### Example 12

[0340] CD28scfv×CD3scfv×Muc17Fab Trispecific 328M2 Activates PBMCs to Express CD25 Only when in the Presence of Muc17 Expressing CHO Cells and Cannot Activate without Muc17 Target Cells. In Contrast the CD3scFv×CD28scFv×Muc17-Fab Trispecific 328M1 is Able to Non-Specifically Activate Cells in the Absence of Muc17, Similarly to the Bispecific Lacking Muc17 Binding, 328-1

[0341] FIG. 16A shows the expression of CD25(MFI) stimulated by increasing concentrations of the bispecific and trispecific molecules T cells when PBMCs are in the presence of MUC17 expressing CHO cells, showing both 328M1 and 328M2 active T cells to express CD25 similarly.

[0342] FIG. 16B shows the expression of CD25(MFI) stimulated by increasing concentrations of the bispecific and trispecific molecules T cells when PBMCs are in the presence of parental CHO cells, showing 328M1 stimulates T cells whereas 328M2 can not stimulate without MUC17 expressing cells. Similarly, 328-1, which lacks the anti-MUC17 Fab, also activates T cells in the absence of MUC17 target cells, whereas 328-2 cannot.

[0343] Versions-1 have the configuration CD3Scfv-CD28Scfv-Fc×MUC17Fab-Fc or Fc and versions-2 have the configuration CD28scfv-CD3Scfv-Fc×MUC17Fab-Fc or Fc. This indicates the version-2 configuration, CD28scfv-CD3Scfv-Fc, has improved properties over the version-1 configuration, CD3Scfv-CD28Scfv-Fc, because version-2 configuration requires the presence of target cells to activate T cells and thus is less likely to cause non-specific activation of T cells and potential toxicity.

### Example 13

[0344] CD137×CD3×Muc17 Trispecific Molecules 34M1 and 34M4 Increase CD4 and CD8 T Cell Numbers when PBMCs are Cultured with Muc17 Expressing CHO Cells to a Greater Level than the Benchmark CD3 Bispecific 3M8B7

[0345] FIG. 17A is a graph of concentration of the molecules in nM (treatment (nM)) versus CD8+ cell counts as determined by staining the cells with fluorescently labeled antibodies against CD3 and CD4 or CD8 and assessment by flow cytometry

[0346] FIG. 17B is a graph of concentration of the molecules in nM (treatment (nM)) versus CD4+ cell counts as determined by staining the cells with fluorescently labeled antibodies against CD3 and CD4 or CD8 and assessment by flow cytometry

### Example 14

[0347] Trispecific Molecules 328C1, 328C 2, 328C3, 328C4 Activate T-Cells to Secrete IL-2 Better to a Greater Level than the 3C27I CD3×Cldn18.2 Bite Alone.

[0348] FIG. 21 is a graph of concentration (nM) of the molecules versus concentration of secreted IL-2 (pg/mL) as determined by ELISA.

### Example 15

[0349] CD3×CD137×CLDN18.2 trispecific molecules 34C4 and 34C3 activate PBMCs in the presence of SNU-601 cells to express more CD25 than 3C18I

[0350] FIG. 22 is a graph of the concentration (nM) of the molecules versus CD25 mean fluorescence intensity (MFI) on CD3+ T cells from the cultures.

### Example 16

[0351] CD3×CD137×CLDN18.2 Trispecific Molecules 34C4 and 34C3 Activate PBMCs in the Presence of SNU-601 Cells to Secrete More IFNgamma than 3C18I Alone

[0352] FIG. 23 is a graph of the concentration (nM) of the molecules versus IFNg (absorbance at 650 nm) as determined by ELISA.

### Example 17

[0353] CD3×CD137×CLDN18.2 trispecific 34C3 increases CD8 T cell numbers beyond what is stimulated by the CD3 T cell engager 3C27I in the presence of CHO cells expressing CLDN18.2

[0354] FIG. 24 is a graph of the concentration of the molecules in nM (treatment (nM)) versus CD8+ cell counts as determined by flow cytometry from the cultures.

[0355] The therapeutic method of the present specification may include the step of administering the composition including the antibody at a pharmaceutically effective amount. The total daily dose should be determined through appropriate medical judgment by a physician, and administered once or several times. The specific therapeutically effective dose level for any particular patient may vary depending on various factors well known in the medical art, including the kind and degree of the response to be achieved, concrete compositions according to whether other agents are used therewith or not, the patient's age, body weight, health condition, gender, and diet, the time and route of administration, the secretion rate of the composition, the time period of therapy, other drugs used in combination or coincident with the composition disclosed herein, and like factors well known in the medical arts.

[0356] In still another aspect, the present specification provides a use of the therapeutic protein or the pharmaceutical composition including the same in the preparation of drugs for the prevention or treatment of cancer, a neurodegenerative or an infectious disease.

[0357] In one embodiment, the dose of the composition may be administered daily, semi-weekly, weekly, bi-weekly, or monthly. The period of treatment may be for a week, two weeks, a month, two months, four months, six months, eight months, a year, or longer. The initial dose may be larger than a sustaining dose. In one embodiment, the dose ranges from a weekly dose of at least 0.01 mg/kg, at least 0.25 mg/kg, at least 0.3 mg/kg, at least 0.5 mg/kg, at least 0.75 mg/kg, at least 1 mg/kg, at least 2 mg/kg, at least 3 mg/kg, at least 4 mg/kg, at least 5 mg/kg, at least 6 mg/kg, at least 7 mg/kg, at least 8 mg/kg, at least 9 mg/kg, at least 10 mg/kg, at least 15 mg/kg, at least 20 mg/kg, at least 25 mg/kg, or at least 30 mg/kg In one embodiment, a weekly dose may be at most 1.5 mg/kg, at most 2 mg/kg, at most 2.5 mg/kg, at most 3 mg/kg, at most 4 mg/kg, at most 5 mg/kg, at most 6 mg/kg, at most 7 mg/kg, at most 8 mg/kg, at most 9 mg/kg, at most 10 mg/kg, at most 15 mg/kg, at most 20 mg/kg, at most 25 mg/kg, or at most 30 mg/kg. In a particular aspect, the weekly dose may range from 5 mg/kg to 20 mg/kg. In an alternative aspect, the weekly dose may range from 10 mg/kg to 15 mg/kg.

[0358] The present specification also provides a pharmaceutical composition for the administration to a subject. The pharmaceutical composition disclosed herein may further include a pharmaceutically acceptable carrier, excipient, or diluent. As used herein, the term “pharmaceutically acceptable” means that the composition is sufficient to achieve the therapeutic effects without deleterious side effects, and may be readily determined depending on the type of the diseases, the patient's age, body weight, health conditions, gender, and drug sensitivity, administration route, administration mode, administration frequency, duration of treatment, drugs used in combination or coincident with the composition disclosed herein, and other factors known in medicine.

[0359] The pharmaceutical composition including the antibody disclosed herein may further include a pharmaceutically acceptable carrier. For oral administration, the carrier may include, but is not limited to, a binder, a lubricant, a disintegrant, an excipient, a solubilizer, a dispersing agent, a stabilizer, a suspending agent, a colorant, and a flavorant. For injectable preparations, the carrier may include a buffering agent, a preserving agent, an analgesic, a solubilizer, an isotonic agent, and a stabilizer. For preparations for topical administration, the carrier may include a base, an excipient, a lubricant, and a preserving agent.

[0360] The disclosed compositions may be formulated into a variety of dosage forms in combination with the aforementioned pharmaceutically acceptable carriers. For example, for oral administration, the pharmaceutical composition may be formulated into tablets, troches, capsules, elixirs, suspensions, syrups or wafers. For injectable preparations, the pharmaceutical composition may be formulated into an ampule as a single dosage form or a multidose container. The pharmaceutical composition may also be formulated into solutions, suspensions, tablets, pills, capsules and long-acting preparations.

[0361] On the other hand, examples of the carrier, the excipient, and the diluent suitable for the pharmaceutical formulations include, without limitation, lactose, dextrose, sucrose, sorbitol, mannitol, xylitol, erythritol, maltitol, starch, acacia rubber, alginate, gelatin, calcium phosphate, calcium silicate, cellulose, methylcellulose, microcrystalline cellulose, polyvinylpyrrolidone, water, methylhydroxybenzoate, propylhydroxybenzoate, talc, magnesium stearate and mineral oils. In addition, the pharmaceutical formulations may further include fillers, anti-coagulating agents, lubricants, humectants, flavorants, and antiseptics.

[0362] Further, the pharmaceutical composition disclosed herein may have any formulation selected from the group consisting of tablets, pills, powders, granules, capsules, suspensions, liquids for internal use, emulsions, syrups, sterile aqueous solutions, non-aqueous solvents, lyophilized formulations and suppositories.

[0363] The composition may be formulated into a single dosage form suitable for the patient's body, and preferably is formulated into a preparation useful for peptide drugs according to the typical method in the pharmaceutical field so as to be administered by an oral or parenteral route such as through skin, intravenous, intramuscular, intra-arterial, intramedullary, intramedullary, intraventricular, pulmonary, transdermal, subcutaneous, intraperitoneal, intranasal, intracolonic, topical, sublingual, vaginal, or rectal administration, but is not limited thereto.

[0364] The composition may be used by blending with a variety of pharmaceutically acceptable carriers such as physiological saline or organic solvents. In order to increase the stability or absorptivity, carbohydrates such as glucose, sucrose or dextrans, antioxidants such as ascorbic acid or glutathione, chelating agents, low molecular weight proteins or other stabilizers may be used.

[0365] The administration dose and frequency of the pharmaceutical composition disclosed herein are determined by the type of active ingredient, together with various factors such as the disease to be treated, administration route, patient's age, gender, and body weight, and disease severity.

[0366] The total effective dose of the compositions disclosed herein may be administered to a patient in a single dose, or may be administered for a long period of time in multiple doses according to a fractionated treatment protocol. In the pharmaceutical composition disclosed herein, the content of active ingredient may vary depending on the disease severity. Preferably, the total daily dose of the peptide disclosed herein may be approximately 0.0001 μg to 500 mg per 1 kg of body weight of a patient. However, the effective dose of the peptide is determined considering various factors including patient's age, body weight, health conditions, gender, disease severity, diet, and secretion rate, in addition to administration route and treatment frequency of the pharmaceutical composition. In view of this, those skilled in the art may easily determine an effective dose suitable for the particular use of the pharmaceutical composition disclosed herein. The pharmaceutical composition disclosed herein is not particularly limited to the formulation, and administration route and mode, as long as it shows suitable effects.

[0367] Moreover, the pharmaceutical composition may be administered alone or in combination or coincident with other pharmaceutical formulations showing prophylactic or therapeutic efficacy.

[0368] In still another aspect, the present specification provides a method for preventing or treating of cancer, infectious diseases or neurodegenerative diseases comprising the step of administering to a subject the chimeric protein or the pharmaceutical composition including the same.

[0369] Given the teachings and guidance provided herein, those skilled in the art will understand that a formulation described herein can be equally applicable to many types of biopharmaceuticals, including those exemplified, as well as others known in the art. Given the teachings and guidance provided herein, those skilled in the art also will understand that the selection of, for example, type(s) or and/or amount(s) of one or more excipients, surfactants and/or optional components can be made based on the chemical and functional compatibility with the biopharmaceutical to be formulated and/or the mode of administration as well as other chemical, functional, physiological and/or medical factors well known in the art. For example, non-reducing sugars exhibit favorable excipient properties when used with polypeptide biopharmaceuticals compared to reducing sugars. Accordingly, exemplary formulations are exemplified further herein with reference to polypeptide biopharmaceuticals. However, the range of applicability, chemical and physical properties, considerations and methodology applied to polypeptide biopharmaceutical can be similarly applicable to biopharmaceuticals other than polypeptide biopharmaceuticals.

[0370] In various embodiments, a formulation can include, without limitation, combinations of bioactive agents (such as viruses, proteins, antibodies, peptides and the like as described herein) in the formulation. For example, a formulation as described herein can include a single bioactive agent for treatment of one or more conditions, including without limitation, disease. A formulation as described herein also can include, in an embodiment, without limitation, two or more different bioactive agents for a single or multiple conditions. Use of multiple bioactive agents in a formulation can be directed to, for example, the same or different indications. Similarly, in another embodiment, multiple bioactive agents can be used in a formulation to treat, for example, both a pathological condition and one or more side effects caused by the primary treatment. In a further embodiment, multiple bioactive agents also can be included, without limitation, in a formulation as described herein to accomplish different medical purposes including, for example, simultaneous treatment and monitoring of the progression of the pathological condition. In an additional embodiment, multiple, concurrent therapies such as those exemplified herein as well as other combinations well known in the art are particularly useful for patient compliance because a single formulation can be sufficient for some or all suggested treatments and/or diagnosis. Those skilled in the art will know those bioactive agents that can be admixed for a wide range of combination therapies. Similarly, in various embodiments, a formulation can be used with a small molecule drug and combinations of one or more bioactive agents together with one or more small molecule pharmaceuticals. Therefore, in various embodiments a formulation is provided containing 1, 2, 3, 4, 5 or 6 or more different bioactive agents, as well as, for one or more bioactive agents combined with one or more small molecule pharmaceuticals.

[0371] In various embodiments, a formulation can include, one or more preservatives and/or additives known in the art. Similarly, a formulation can further be formulated, without limitation, into any of various known delivery formulations. For example, in an embodiment, a formulation can include, surfactants, adjuvant, biodegradable polymers, hydrogels, etc., such optional components, their chemical and functional characteristics are known in the art. Similarly known in the art are formulations that facilitate rapid, sustained or delayed release of the bioactive agents after administration. A formulation as described can be produced to include these or other formulation components known in the art.

[0372] The composition can therefore be administered as a single dose, or as two or more doses (which may or may not contain the same amount of the desired molecule) over time, or as a continuous infusion via an implantation device or catheter. Further refinement of the appropriate dosage is routinely made by those of ordinary skill in the art and is within the ambit of tasks routinely performed by them. Appropriate dosages may be ascertained through use of appropriate dose-response data. In various embodiments, the bioactive agents in formulations described herein can, without limitation, be administered to patients throughout an extended time period, such as chronic administration for a chronic condition. The composition can be a solid, a semi-solid or an aerosol and a pharmaceutical compositions is formulated as a tablet, geltab, lozenge, orally dissolved strip, capsule, syrup, oral suspension, emulsion, granule, sprinkle or pellet.

[0373] In an embodiment, for oral, rectal, vaginal, parenteral, pulmonary, sublingual and/or intranasal delivery formulations, tablets can be made by compression or molding, optionally with one or more accessory ingredients or additives. In an embodiment, compressed tablets are prepared, for example, by compressing in a suitable tabletting machine, the active ingredients in a free-flowing form such as a powder or granules, optionally mixed with a binder (for example, without limitation, povidone, gelatin, hydroxypropylmethyl cellulose), lubricant, inert diluent, preservative, disintegrant (for example, without limitation, sodium starch glycolate, cross-linked povidone, cross-linked sodium carboxymethyl cellulose) and/or surface-active or dispersing agent.

[0374] In an embodiment, molded tablets are made, for example, without limitation, by molding in a suitable tabletting machine, a mixture of powdered compounds moistened with an inert liquid diluent. In an embodiment, the tablets may optionally be coated or scored, and may be formulated so as to provide slow or controlled release of the active ingredients, using, for example, without limitation, hydroxypropylmethyl cellulose in varying proportions to provide the desired release profile. In an embodiment, tablets may optionally be provided with a coating, without limitation, such as a thin film, sugar coating, or an enteric coating to provide release in parts of the gut other than the stomach. In an embodiment, processes, equipment, and toll manufacturers for tablet and capsule making are well-known in the art.

[0375] In an embodiment, capsule formulations can utilize either hard or soft capsules, including, without limitation, gelatin capsules or vegetarian capsules such as those made out of hydroxymethylpropylcellulose (HMPC). In an embodiment, a type of capsule is a gelatin capsule. In an embodiment, capsules may be filled using a capsule filling machine such as, without limitation, those available from commercial suppliers such as Miranda International or employing capsule manufacturing techniques well-known in the industry, as described in detail in Pharmaceutical Capules, 2.sup.nd Ed., F. Podczeck and B. Jones, 2004. In an embodiment, capsule formulations may be prepared, without limitation, using a toll manufacturing center such as the Chao Center for Industrial Pharmacy & Contract Manufacturing, located at Purdue Research Park.

[0376] Packaging and instruments for administration may be determined by a variety of considerations, such as, without limitation, the volume of material to be administered, the conditions for storage, whether skilled healthcare practitioners will administer or patient self-compliance, the dosage regime, the geopolitical environment (e.g., exposure to extreme conditions of temperature for developing nations), and other practical considerations.

[0377] Injection devices include pen injectors, auto injectors, safety syringes, injection pumps, infusion pumps, glass prefilled syringes, plastic prefilled syringes and needle free injectors syringes may be prefilled with liquid, or may be dual chambered, for example, for use with lyophilized material. An example of a syringe for such use is the Lyo-Ject™, a dual-chamber pre-filled lyosyringe available from Vetter GmbH, Ravensburg, Germany. Another example is the LyoTip which is a prefilled syringe designed to conveniently deliver lyophilized formulations available from LyoTip, Inc., Camarillo, Calif., U.S.A. Administration by injection may be, without limitation intravenous, intramuscular, intraperitoneal, or subcutaneous, as appropriate. Administrations by non-injection route may be, without limitation, nasal, oral, cocular, dermal, or pulmonary, as appropriate.

[0378] In certain embodiments, kits can comprise, without limitation, one or more single or multi-chambered syringes (e.g., liquid syringes and lyosyringes) for administering one or more formulations described herein. In various embodiments, the kit can comprise formulation components for parenteral, subcutaneous, intramuscular or IV administration, sealed in a vial under partial vacuum in a form ready for loading into a syringe and administration to a subject. In this regard, the composition can be disposed therein under partial vacuum. In all of these embodiments and others, the kits can contain one or more vials in accordance with any of the foregoing, wherein each vial contains a single unit dose for administration to a subject.

[0379] The kits can comprise lyophilates, disposed as herein, that upon reconstitution provide compositions in accordance therewith. In various embodiment the kits can contain a lyophilate and a sterile diluent for reconstituting the lyophilate.

[0380] Also described herein, are methods for treating a subject in need of therapy, comprising administering to the subject an effective amount of a formulation as described herein. The therapeutically effective amount or dose of a formulation will depend on the disease or condition of the subject and actual clinical setting.

[0381] In an embodiment, a formulation as described herein can be administered by any suitable route, specifically by parental (including subcutaneous, intramuscular, intravenous and intradermal) administration. It will also be appreciated that the preferred route will vary with the condition and age of the recipient, and the disease being treated. Methods of determining the most effective means and dosage of administration are known to those of skill in the art and will vary, without limitation, with the composition used for therapy, the purpose of the therapy, and the subject being treated. Single or multiple administrations can be carried out, without limitation, the dose level and pattern being selected by the treating physician. Suitable dosage formulations and methods of administering the agents are known in the art.

[0382] The formulations as described herein can be used in the manufacture of medicaments and for the treatment of humans and other animals by administration in accordance with conventional procedures.

[0383] Also provided herein are combinatorial methods for developing suitable virus formulations using combinations of amino acids. These methods are effective for developing stable liquid or lyophilized formulations, and particularly pharmaceutical virus formulations.

[0384] Compositions in accordance with embodiments described herein have desirable properties, such as desirable solubility, viscosity, syringeability and stability. Lyophilates in accordance with embodiments described herein have desirable properties, as well, such as desirable recovery, stability and reconstitution.

[0385] In an embodiment, the pH of the pharmaceutical formulation is at least about 3.5, 3.75, 4, 4.25, 4.5, 4.75, 5, 5.25, 5.5, 5.75, 6, 6.25, 6.5, 6.75, 7, 7.25, 7.5, 7.75, 8, 8.25, 8.5, 8.75, or 9.

[0386] In an embodiment, the pH of the pharmaceutical formulation is from about 3 to about 9, about 4 to about 19, about 5 to about 9, about 6 to about 8, about 6 to about 7, about 6 to about 9, about 5 to about 6, about 5 to about 7, about 5 to about 8, about 4 to about 9, about 4 to about 8, about 4 to about 7, about 4 to about 6, about 4 to about 5, about 3 to about 8, about 3 to about 7, about 3 to about 6, about 3 to about 5, about 3 to about 4, about 7 to about 8, about 7 to about 9, about 7 to about 10.

[0387] Certain embodiments of the present invention are described herein, including the best mode known to the inventors for carrying out the invention. Of course, variations on these described embodiments will become apparent to those of ordinary skill in the art upon reading the foregoing description. The inventor expects skilled artisans to employ such variations as appropriate, and the inventors intend for the present invention to be practiced otherwise than specifically described herein. Accordingly, this invention includes all modifications and equivalents of the subject matter recited in the claims appended hereto as permitted by applicable law. Moreover, any combination of the above-described embodiments in all possible variations thereof is encompassed by the invention unless otherwise indicated herein or otherwise clearly contradicted by context.

[0388] Groupings of alternative embodiments, elements, or steps of the present invention are not to be construed as limitations. Each group member may be referred to and claimed individually or in any combination with other group members disclosed herein. It is anticipated that one or more members of a group may be included in, or deleted from, a group for reasons of convenience and/or patentability. When any such inclusion or deletion occurs, the specification is deemed to contain the group as modified thus fulfilling the written description of all Markush groups used in the appended claims.

[0389] Unless otherwise indicated, all numbers expressing a characteristic, item, quantity, parameter, property, term, and so forth used in the present specification and claims are to be understood as being modified in all instances by the term “about.” As used herein, the term “about” means that the characteristic, item, quantity, parameter, property, or term so qualified encompasses a range of plus or minus ten percent above and below the value of the stated characteristic, item, quantity, parameter, property, or term. Accordingly, unless indicated to the contrary, the numerical parameters set forth in the specification and attached claims are approximations that may vary. At the very least, and not as an attempt to limit the application of the doctrine of equivalents to the scope of the claims, each numerical indication should at least be construed in light of the number of reported significant digits and by applying ordinary rounding techniques. Notwithstanding that the numerical ranges and values setting forth the broad scope of the invention are approximations, the numerical ranges and values set forth in the specific examples are reported as precisely as possible. Any numerical range or value, however, inherently contains certain errors necessarily resulting from the standard deviation found in their respective testing measurements. Recitation of numerical ranges of values herein is merely intended to serve as a shorthand method of referring individually to each separate numerical value falling within the range. Unless otherwise indicated herein, each individual value of a numerical range is incorporated into the present specification as if it were individually recited herein.

[0390] The terms “a,” “an,” “the” and similar referents used in the context of describing the present invention (especially in the context of the following claims) are to be construed to cover both the singular and the plural, unless otherwise indicated herein or clearly contradicted by context. All methods described herein can be performed in any suitable order unless otherwise indicated herein or otherwise clearly contradicted by context. The use of any and all examples, or exemplary language (e.g., “such as”) provided herein is intended merely to better illuminate the present invention and does not pose a limitation on the scope of the invention otherwise claimed. No language in the present specification should be construed as indicating any non-claimed element essential to the practice of the invention.

[0391] Specific embodiments disclosed herein may be further limited in the claims using consisting of or consisting essentially of language. When used in the claims, whether as filed or added per amendment, the transition term “consisting of” excludes any element, step, or ingredient not specified in the claims. The transition term “consisting essentially of” limits the scope of a claim to the specified materials or steps and those that do not materially affect the basic and novel characteristic(s). Embodiments of the present invention so claimed are inherently or expressly described and enabled herein.

[0392] Groupings of alternative embodiments, elements, or steps of the present invention are not to be construed as limitations. Each group member may be referred to and claimed individually or in any combination with other group members disclosed herein. It is anticipated that one or more members of a group may be included in, or deleted from, a group for reasons of convenience and/or patentability. When any such inclusion or deletion occurs, the specification is deemed to contain the group as modified thus fulfilling the written description of all Markush groups used in the appended claims.

[0393] All patents, patent publications, and other publications referenced and identified in the present specification are individually and expressly incorporated herein by reference in their entirety for the purpose of describing and disclosing, for example, the compositions and methodologies described in such publications that might be used in connection with the present invention. These publications are provided solely for their disclosure prior to the filing date of the present application. Nothing in this regard should be construed as an admission that the inventors are not entitled to antedate such disclosure by virtue of prior invention or for any other reason. All statements as to the date or representation as to the contents of these documents is based on the information available to the applicants and does not constitute any admission as to the correctness of the dates or contents of these documents.

[0394] In closing, it is to be understood that although aspects of the present specification are highlighted by referring to specific embodiments, one skilled in the art will readily appreciate that these disclosed embodiments are only illustrative of the principles of the subject matter disclosed herein. Therefore, it should be understood that the disclosed subject matter is in no way limited to a particular methodology, protocol, and/or reagent, etc., described herein. As such, various modifications or changes to or alternative configurations of the disclosed subject matter can be made in accordance with the teachings herein without departing from the spirit of the present specification. Lastly, the terminology used herein is for the purpose of describing particular embodiments only, and is not intended to limit the scope of the present invention, which is defined solely by the claims. Accordingly, the present invention is not limited to that precisely as shown and described.

TABLE 20
SEQUENCES

| Seq ID | sequence | name |
|---|---|---|
| 1 | DYIFSNYYIE | HCDR1; |
| | | DLL3.2, |
| | | DLL3.4 |
| 2 | DYTFSNYYIE | HCDR1; |
| | | DLL3.1 |
| 3 | DYYMN | HCDR1; |
| | | DLL3.9 |
| 4 | DYYVN | HCDR1; |
| | | DLL3.8 |
| 5 | GFTFSNYGMH | HCDR1: |
| | | DLL3.10, |
| | | DLL3.27, |
| | | DLL3.29, |
| | | DLL3.30, |
| | | DLL3.31, |
| | | DLL3.32, |
| | | DLL3.33, |
| | | DLL3.36 |
| 6 | GFTFSSYGMH | HCDR1: |
| | | DLL3.5, |
| | | DLL3.12, |
| | | DLL3.13, |
| | | DLL3.14, |
| | | DLL3.15, |
| | | DLL3.16, |
| | | DLL3.17, |
| | | DLL3.18, |
| | | DLL3.19, |
| | | DLL3.20, |
| | | DLL3.21, |
| | | DLL3.22, |
| | | DLL3.23, |
| | | DLL3.24, |
| | | DLL3.25, |
| | | DLL3.26 |
| 7 | GFTFSSYGMH | HCDR1: |
| | | DLL3.3, |
| | | DLL3.11 |
| 8 | SAYYWN | HCDR1: |
| | | DLL23.34, |
| | | DLL3.35 |
| 9 | SYYWS | HCDR1: |
| | | DDL3.28 |
| 10 | EILPGNGNTVYNEKFKD | HCDR2; |
| | | DLL3.1 |
| 11 | EILPGTGNTVYNEKFKD | HCDR2: |
| | | DLL3.2, |
| | | DLL3.4 |
| 12 | IISPNDGGTNYNQKFKG | HCDR2; |
| | | DLL3.8 |
| 13 | VINPDNGITTYNQKFKG | HCDR2; |
| | | DLL3.9 |
| 14 | VINPYNDITIYNQKFQG | HCDR2: |
| | | DLL3.3 |
| 15 | VISGSGSSKYYADSVKG | HCDR2; |
| | | DLL3.11, |
| | | DLL3.15, |
| | | DLL3.18, |
| | | DLL3.22 |
| 16 | VISHHGSSKYYADSVKG | HCDR2: |
| | | DLL3.5, |
| | | DLL3.10, |
| | | DLL3.12, |
| | | DLL3.14, |
| | | DLL3.17, |
| | | DLL3.19, |
| | | DLL3.21, |
| | | DLL3.23, |
| | | DLL3.25, |
| | | DLL3.26, |
| | | DLL3.27, |
| | | DLL3.31, |
| | | DLL3.32, |
| | | DLL3.33 |
| 17 | VISHHGSSKYYARSVKG | HCDR2: |
| | | DLL3.29, |
| | | DLL3.30, |
| | | DLL3.36 |
| 18 | VISYDGSSKYYADSVKG | HCDR2; |
| | | DLL3.13, |
| | | DLL3.16, |
| | | DLL3.20, |
| | | DLL3.24 |
| 19 | YISDVGHNYYNPSLKN | HCDR2; |
| | | DLL3.34 |
| 20 | YISDVGSNNYNPSLKN | HCDR2; |
| | | DLL3.35 |
| 21 | YVYYSGTTNYNPSLKS | HCDR2; |
| | | DLL3.28 |
| 22 | WGDYALFAN | HCDR3: |
| | | DLL3.1, |
| | | DLL3.2, |
| | | DLL3.4 |
| 23 | DQVFAY | HCDR3; |
| | | DLL3.8, |
| | | DLL3.34, |
| | | DLL3.35 |
| 24 | DWFFYLFDY | HCDR3; |
| | | DLL3.5, |
| | | DLL3.10, |
| | | DLL3.11, |
| | | DLL3.12, |
| | | DLL3.13, |
| | | DLL3.14, |
| | | DLL3.15, |
| | | DLL3.16, |
| | | DLL3.17, |
| | | DLL3.26, |
| | | DLL3.27, |
| | | DLL3.31 |
| 25 | DWFYFIFDY | HCDR3; |
| | | DLL3.18, |
| | | DLL3.19, |
| | | DLL3.20, |
| | | DLL3.21, |
| | | DLL3.22, |
| | | DLL3.23, |
| | | DLL3.24, |
| | | DLL3.25, |
| | | DLL3.32, |
| | | DLL3.33 |
| 26 | DWWELVFDY | HCDR3; |
| | | DLL3.29, |
| | | DLL3.20, |
| | | DLL3.36 |
| 27 | EGVLYDGYYEGAY | HCDR3; |
| | | DLL3.3 |
| 28 | GVWNYERSFDY | HCDR3; |
| | | DLL3.9 |
| 29 | SIAVTGFYFDY | HCDR3; |
| | | DLL3.28 |
| 30 | SASSSVSYMH | LCDR1; |
| | | DLL3.35 |
| 31 | KASQNVGIAVA | LCDR1; |
| | | DLL3.3 |
| 32 | KASQNVGTNVA | LCDR1: |
| | | DLL3.1, |
| | | DLL3.2, |
| | | DLL3.4, |
| | | DLL3.9, |
| | | DLL3.28 |
| 33 | KSSQSLLHSDAKTFLY | LCDR1; |
| | | DLL3.22, |
| | | DLL3.23, |
| | | DLL3.24, |
| | | DLL3.25, |
| | | DLL3.26, |
| | | DLL3.27, |
| | | DLL3.32, |
| | | DLL3.33 |
| 34 | KSSQSLLHSDGKTFLY | LDCR1: |
| | | DLL3.5, |
| | | DLL3.10, |
| | | DLL3.15, |
| | | DLL3.16, |
| | | DLL3.17, |
| | | DLL3.29, |
| | | DLL3.30, |
| | | DLL3.32, |
| | | DLL3.36 |
| 35 | RASESVHSYGNSLIH | LDCR1; |
| | | DLL3.34 |
| 36 | RSSKSLLHSNGITYLY | LCDR1; |
| | | DLL3.8 |
| 37 | RSSQSLLHSDAKTFLD | LCDR1; |
| | | DLL3.18, |
| | | DLL3.19, |
| | | DLL3.20, |
| | | DLL3.21, |
| 38 | RSSQSLLHSDGKTFLD | LCDR1: |
| | | DLL3.11, |
| | | DLL3.12, |
| | | DLL3.13, |
| | | DLL3.14 |
| 39 | SASYRYS | LCDR2: |
| | | DLL3.4, |
| | | DLL3.28 |
| 40 | AASNRYT | LCDR2: |
| | | DLL3.3 |
| 41 | DTSKLAS | LCDR2; |
| | | DLL3.35 |
| 42 | EVSNRAS | LCDR2; |
| | | DLL3.11, |
| | | DLL3.12, |
| | | DLL3.13, |
| | | DLL3.14, |
| | | DLL3.18, |
| | | DLL3.19, |
| | | DLL3.20, |
| | | DLL3.21 |
| 43 | EVSNRFS | LCDR2: |
| | | DLL3.5, |
| | | DLL3.10, |
| | | DLL3.15, |
| | | DLL3.16, |
| | | DLL3.17, |
| | | DLL3.22, |
| | | DLL3.23, |
| | | DLL3.14, |
| | | DLL3.25, |
| | | DLL3.26, |
| | | DLL3.27, |
| | | DLL3.29, |
| | | DLL3.30, |
| | | DLL3.31, |
| | | DLL3.32, |
| | | DLL3.33, |
| | | DLL3.36 |
| 44 | QMSNLAS | LCDR2; |
| | | DLL3.8 |
| 45 | RASNLES | LCDR2; |
| | | DLL3.34 |
| 46 | SASYRYS | LCDR2; |
| | | DLL3.1, |
| | | DLL3.2, |
| | | DLL3.9 |
| 47 | QQYSTYPYT | LCDR3: |
| | | DLL3.3 |
| 48 | AQNLELP | LCDR3: |
| | | DLL3.8 |
| 49 | LQGERLPFT | LCDR3; |
| | | DLL3.5, |
| | | DLL3.10, |
| | | DLL3.11, |
| | | DLL3.12, |
| | | DLL3.13, |
| | | DLL3.14, |
| | | DLL3.15, |
| | | DLL3.16, |
| | | DLL3.17, |
| | | DLL3.26, |
| | | DLL3.27, |
| | | DLL3.31 |
| 50 | LQGIHLPFT | LCDR3; |
| | | DLL3.29, |
| | | DLL3.30, |
| | | DLL3.36 |
| 51 | LQGRELPFT | LCDR3; |
| | | DLL3.18, |
| | | DLL3.19, |
| | | DLL3.20, |
| | | DLL3.21, |
| | | DLL3.22, |
| | | DLL3.23, |
| | | DLL3.24, |
| | | DLL3.25, |
| | | DLL3.32, |
| | | DLL3.33 |
| 52 | QQTNEDP | LCDR3; |
| | | DLL3.34 |
| 53 | QQWSSNPLT | LCDR3; |
| | | DLL3.35 |
| 54 | QQYNNYPLT | LCDR3; |
| | | DLL3.4, |
| | | DLL3.9, |
| | | DLL3.28 |
| 55 | QQYNSYPFT | LCDR3; |
| | | DLL3.1, |
| | | DLL3.2 |
| 56 | EVQLLESGGGLVQPGGSLRLSCAASGFTFSSYGMHWVRQAPGK | VH; |
| | GLEWVAVISGSGSSKYYADSVKGRFTISRDNSKNTLYLQMNSLRA | DLL3.11, |
| | EDTAVYYCARDWFFYLFDYWGQGTLVTVSS | DLL3.15 |
| 57 | EVQLLESGGGLVQPGGSLRLSCAASGFTFSSYGMHWVRQAPGK | VH: |
| | GLEWVAVISGSGSSKYYADSVKGRFTISRDNSKNTLYLQMNSLRA | DLL3.18, |
| | EDTAVYYCARDWFYFIFDYWGQGTLVTVSS | DLL3.22 |
| 58 | EVQLLESGGGLVQPGGSLRLSCAASGFTFSSYGMHWVRQAPGK | VH; |
| | GLEWVAVISHHGSSKYYADSVKGRFTISRDNSKNTLYLQMNSLRA | DLL3.5, |
| | EDTAVYYCARDWFFYLFDYWGQGTLVTVSS | DLL3.12, |
| | | DLL3.26 |
| 59 | EVQLLESGGGLVQPGGSLRLSCAASGFTFSSYGMHWVRQAPGK | VH; |
| | GLEWVAVISHHGSSKYYADSVKGRFTISRDNSKNTLYLQMNSLRA | DLL3.19, |
| | EDTAVYYCARDWFYFIFDYWGQGTLVTVSS | DLL3.23 |
| 60 | EVQLLESGGGLVQPGGSLRLSCAASGFTFSSYGMHWVRQAPGK | VH; |
| | GLEWVAVISYDGSSKYYADSVKGRFTISRDNSKNTLYLQMNSLRA | DLL3.13, |
| | EDTAVYYCARDWFFYLFDYWGQGTLVTVSS | DLL3.16, |
| 61 | EVQLLESGGGLVQPGGSLRLSCAASGFTFSSYGMHWVRQAPGK | VH; |
| | GLEWVAVISYDGSSKYYADSVKGRFTISRDNSKNTLYLQMNSLRA | DLL3.20, |
| | EDTAVYYCARDWFYFIFDYWGQGTLVTVSS | DLL3.24 |
| 62 | EVQLLESGGGLVQPGGSLRLSCAASGFTFSSYGMHWVRQAPGK | VH; |
| | GLEWVSVISHHGSSKYYADSVKGRFTISRDNSKNTLYLQMNSLRA | DLL3.14, |
| | EDTAVYYCAKDWFFYLFDYWGQGTLVTVSS | DLL3.17 |
| 63 | EVQLLESGGGLVQPGGSLRLSCAASGFTFSSYGMHWVRQAPGK | VH; |
| | GLEWVSVISHHGSSKYYADSVKGRFTISRDNSKNTLYLQMNSLRA | DLL3.21, |
| | EDTAVYYCAKDWFYFIFDYWGQGTLVTVSS | DLL3.25 |
| 64 | EVQLQQSGPVLVKPGASVKMSCKASGFTFTDYYMNWVKQSHGK | VH; |
| | SLEWIGVINPDNGITTYNQKFKGKATLTVDKSSSTAYMELNGLTSE | DLL3.9 |
| | DSAVYYCARGVWNYERSFDYWGQGTTLTVSS | |
| 65 | EVQLVESGGGLVQPGGSLRLSCAASGFTFSNYGMHWVRQAPGK | VH; |
| | GLEWVAVISHHGSSKYYADSVKGRYTISRDNSKNTLYLQMNSLRA | DLL3.27 |
| | EDTAVYYCARDWFFYLFDYWGQGTLVTVSS | |
| 66 | QVQLQESGPGLVKPSETLSLTCTVSGGSISSYYWSWIRQPPGKGL | VH; |
| | EWIGYVYYSGTTNYNPSLKSRVTISVDTSKNQFSLKLSSVTAADTA | DLL3.28 |
| | VYYCASIAVTGFYFDYWGQGTLVTVSS | |
| 67 | QVQLQQSGPVLVKPGASVKMSCKASGYSFTDYYVNWVKQSHGK | VH; |
| | SLEWIGIISPNDGGTNYNQKFKGKATLTVDKSSSTAYMEVNSLTSE | DLL3.8 |
| | DSAVYYCARDDDLGWYFDVWGTGTTVTVSS | |
| 68 | QVQLVESGGGAVQPGRSLRLSCAASGFTFSNYGMHWVRQAPGK | VH; |
| | GLEWVAVISHHGSSKYYARSVKGRFTISRDNSKNTLYLEMNSLRA | DLL3.29, |
| | EDTAVYYCARDVWVELVFDYWGQGTLVTVSS | DLL3.30, |
| | | DLL3.36 |
| 69 | QVQLVESGGGWQPGRSLRLSCAASGFTFSNYGMHWVRQAPGK | VH |
| | GLEWVAVISHHGSSKYYADSVKGRFTISRDNSKNTLYLQMNSLRA | DLL3.10, |
| | EDTAVYYCARDWFFYLFDYWGQGTLVTVSS | DLL3.31 |
| 70 | QVQLVESGGGWQPGRSLRLSCAASGFTFSNYGMHWVRQAPGK | VH; |
| | GLEWVAVISHHGSSKYYADSVKGRFTISRDNSKNTLYLQMNSLRA | DLL3.32, |
| | EDTAVYYCARDWFYFIFDYWGQGTLVTVSS | DLL3.33 |
| 71 | QVQLVQSGAEVKKPGASVKVSCKASDYTFSNYYIEWVRQAPGQG | VH; |
| | LEWMGEILPGNGNTVYNEKFKDRVTMTVDTSTSTAYMELRSLRSD | DLL3.1 |
| | DTAVYYCARWGDYALFANWGQGTLVTVSS | |
| 72 | QVQLVQSGAEVKKPGASVKVSCKASGYTFTDYFMNWVRQAPGQ | VH; |
| | GLEWMGVINPYNDITIYNQKFQGRVTMTVDRSTSTVYMELSSLRS | DLL3.3 |
| | EDTAVYYCAREGVLYDGYYEGAYWGQGTLVTVSS | |
| 73 | QVQLVQSGAEVKKPGASVKVSCKATDYIFSNYYIEWVRQAPGQGL | VH; |
| | EWMGEILPGTGNTVYNEKFKDRVTMTVDTSTSTVYMELSSLRSED | DLL3.2, |
| | TAVYYCARWGDYALFANWGQGTLVTVSS | DLL3.4 |
| 74 | SDVQLQESGPGLVKPSQSLSLTCSVTGYSITSAYYWNWIRQFPGN | VH |
| | KLEWMGYISDVGHNYYNPSLKNRISITRDTSKNQFFLKLNSVTPED | DLL3.34 |
| | TATYYCARDQVFAYWGQGTLVTVSA | |
| 75 | SDVQLQESGPGLVKPSQSLSLTCSVTGYSITSAYYWNWIRQFPGN | VH |
| | KLEWMGYISDVGSNNYNPSLKNRISITRDTFKNQFFLKLNSVTTED | DLL3.35 |
| | TATYFCTRDQVFAYWGQGTLVTVS | |
| 76 | DIQLTQSPSFLSASVGDRVTITCKASQNVGIAVAWYQQKPGKAPKL | VL; |
| | LIYAASNRYTGVPSRFSGSGSGTEFTLTISSLQPEDFATYYCQQYS | DLL3.3 |
| | TYPYTFGQGTKLEIK | |
| 77 | DIQMTQSPSFLSASVGDRVTITCKASQNVGTNVAWYQQKPGKAPK | VL; |
| | PLIYSTSYRYSGVPSRFSGSGSGTEFTLTISSLQPEDFATYYCQQY | DLL3.4 |
| | NNYPLTFGGGTKVEIK | |
| 78 | DIQMTQSPSSLSASVGDRVTITCKSSQSLLHSDAKTFLYWYQQKP | VL; |
| | GKAPKLLIYEVSNRFSGVPSRFSGSGSGTDFTLTISSLQPEDFATY | DLL3.26 |
| | YCLQGERLPFTFGQGTKVEIK | |
| 78 | DIQMTQSPSSLSASVGDRVTITCKSSQSLLHSDAKTFLYWYQQKP | VL; |
| | GKAPKLLIYEVSNRFSGVPSRFSGSGSGTDFTLTISSLQPEDFATY | DLL3.27 |
| | YCLQGERLPFTFGQGTKVEIK | |
| 79 | DIQMTQSPSTLSASVGDRVTITCKASQNVGTNVAWYQQKPGKAPK | VL; |
| | ALIYSASYRYSGVPSRFSGSGSGTEFTLTISSLQPDDFATYYCQQY | DLL3.1 |
| | NSYPFTFGQGTKLEIK | |
| 79 | DIQMTQSPSTLSASVGDRVTITCKASQNVGTNVAWYQQKPGKAPK | VL; |
| | ALIYSASYRYSGVPSRFSGSGSGTEFTLTISSLQPDDFATYYCQQY | DLL3.2 |
| | NSYPFTFGQGTKLEIK | |
| 80 | DIVMTQAAFSNPVTVGTSASISCRSSKSLLHSNGITYLYWYLQKPG | VL; |
| | QSPQLLIYQMSNLASGVPDRFSSSGSGTDFTLRISRVEAEDVGVY | DLL3.8 |
| | YCAQNLELPWTFGGGTKLEIK | |
| 81 | DIVMTQSPKFMSTSVGDRVSVTCKASQNVGTNVAWYQQKPGQSP | VL; |
| | KALIYSASYRYSGVPDRFTGSGSGTDFTLTFSSVQSEDLAEYFCQ | DLL3.9 |
| | QYNNYPLTFGGGTKLEIK | |
| 82 | DIVMTQSPLSLPVTPGEPASISCKSSQSLLHSDAKTFLYWYLQKPG | VL; |
| | QSPQLLIYEVSNRFSGVPDRFSGSGSGTDFTLKISRVEAEDVGVYY | DLL3.22, |
| | CLQGRELPFTFGQGTKVEIK | DLL3.23, |
| | | DLL3.24, |
| | | DLL3.25 |
| 83 | DIVMTQSPLSLPVTPGEPASISCKSSQSLLHSDGKTFLYWYLQKPG | VL; |
| | QSPQLLIYEVSNRFSGVPDRFSGSGSGTDFTLKISRVEAEDVGVYY | DLL3.5, |
| | CLQGERLPFTFGQGTKVEIK | DLL3.15, |
| | | DLL3.16, |
| | | DLL3.17 |
| 84 | DIVMTQSPLSLPVTPGEPASISCRSSQSLLHSDAKTFLDWYLQKPG | VL |
| | QSPQLLIYEVSNRASGVPDRFSGSGSGTDFTLKISRVEAEDVGVYY | DLL3.18, |
| | CLQGRELPFTFGQGTKVEIK | DLL3.19, |
| | | DLL3.20, |
| | | DLL3.21 |
| 85 | DIVMTQSPLSLPVTPGEPASISCRSSQSLLHSDGKTFLDWYLQKPG | VL; |
| | QSPQLLIYEVSNRASGVPDRFSGSGSGTDFTLKISRVEAEDVGVYY | DLL3.11, |
| | CLQGERLPFTFGQGTKVEIK | DLL3.12, |
| | | DLL3.13, |
| | | DLL3.14 |
| 86 | DIVMTQTPLSLSVTPGQPASISCKSSQSLLHSDAKTFLYWYLQKPG | VL |
| | QPPQLLIYEVSNRFSGVPDRFSGSGSGTDFTLKISRVEAEDVGVYY | DLL3.32, |
| | CLQGRELPFTFGPGTKVEIK | DLL3.33 |
| 87 | DIVMTQTPLSLSVTPGQPASISCKSSQSLLHSDGKTFLYWYLQKPG | VL; |
| | QPPQLLIYEVSNRFSGVPDRFSGSGSGTDFTLKISRVEAEDVGVYY | DLL3.10, |
| | CLQGERLPFTFGPGTKVEIK | DLL3.31 |
| 88 | DIVMTQTPLSLSVTPGQPASISCKSSQSLLHSDGKTFLYWYLQKPG | VL; |
| | QPPQLLIYEVSNRFSGVPDRFSGSGSGTDFTLKISRVEAEDVGVYY | DLL3.29, |
| | CLQGIHLPFTFGPGTKVEIK | DLL3.30, |
| | | DLL3.36 |
| 89 | DTVLTQSPASLAVSLGQRATISCRASESVHSYGNSLIHWYQQKPG | VL; |
| | QPPRLLIYRASNLESGIPARFSGSGSRTDFTLTINPVEADDVATYYC | DLL3.34 |
| | QQTNEDPLTFGAGTKLELK | |
| 90 | EIVLTQSPGTLSLSPGERVTLSCRASQRVNNNYLAWYQQRPGQAP | VL; |
| | RLLIYGASSRATGIPDRFSGSGSGTDFTLTISRLEPEDFAVYYCQQ | DLL3.28 |
| | YDRSPLTFGGGTKLEIK | |
| 91 | QIVLTQSPAIMSASPGEKVTMTCSASSSVSYMHWYQQKSGTSPKR | VL; |
| | WIYDTSKLASGVPARFSGSGSGTSYSLTISSMEAEDAATYYCQQW | DLL3.35 |
| | SSNPLTFGAGTKLELK | |
| 92 | GFTFSSFGMH | HCDR1; |
| | | Muc17.7, |
| | | Muc17.21, |
| | | Muc17.22, |
| | | Muc17.23, |
| | | Muc17.24 |
| 93 | GYAFSDYWIN | HCDR1: |
| | | Muc17.2 |
| 94 | GYEFSSHWMN | HCDR1; |
| | | Muc17.1, |
| | | Muc17.8, |
| | | Muc17.9, |
| | | muc17.10, |
| | | Muc17.11, |
| | | Muc17.12, |
| | | Muc17.13, |
| | | Muc17.14, |
| | | Muc17.25, |
| | | Muc71.26, |
| | | Muc17.27, |
| | | Muc17.28, |
| | | Muc17.29, |
| | | Muc17.30, |
| | | Muc17.31 |
| 95 | GYIFSNHWMN | HCDR1: |
| | | Mcu17.3 |
| 96 | GYTFTSYWLN | HCDR1; |
| | | Muc17.17, |
| | | Muc17.42, |
| | | Muc17.43, |
| | | Muc17.44, |
| | | Muc17.46, |
| | | Muc17.47 |
| 97 | GYTFTSYWMN | HCDR1; |
| | | Muc17.4, |
| | | Muc17.5, |
| | | Muc17.6, |
| | | Muc17.15, |
| | | Muc17.16, |
| | | Muc17.18, |
| | | Muc17.19, |
| | | Muc17.20, |
| | | Muc17.32, |
| | | Muc17.33, |
| | | Muc17.34, |
| | | Muc17.35, |
| | | Muc17.36, |
| | | Muc17.37, |
| | | Muc17.38, |
| | | Muc17.39, |
| | | Muc17.40, |
| | | Muc17.41, |
| | | Muc17.45, |
| | | Muc17.48, |
| | | Muc17.49 |
| 98 | GYTFTSYWMN | HCDR1; |
| | | Mcu17.31 |
| 99 | MIHPSDSESRLNQKFKD | HCDR2; |
| | | Muc17.17. |
| | | Muc17.39, |
| | | Muc17.40, |
| | | Muc17.41, |
| | | Muc17.46, |
| | | Muc17.47 |
| 100 | MIHPSDSETRLNQEFKD | HCDR2; |
| | | Muc17.5, |
| | | Muc17.20 |
| 101 | MIHPSDSETRLNQKFKD | HCDR2; |
| | | Muc17.4, |
| | | Muc17.15, |
| | | Muc17.16, |
| | | Muc17.18, |
| | | Muc17.19, |
| | | Muc17.31, |
| | | Muc17.33, |
| | | Muc17.34, |
| | | Muc17.35, |
| | | Muc17.36, |
| | | Muc17.37, |
| | | Muc17.38, |
| | | Muc17.42, |
| | | Muc17.43, |
| | | Muc17.44, |
| | | Muc17.45, |
| | | Muc17.48, |
| | | Muc17.49 |
| 102 | MIHPSDSETRLNQKFTD | HCDR2; |
| | | Muc17.6 |
| 103 | QIYPGDGDINYNEKFRG | HCDR2; |
| | | Muc17.1, |
| | | Muc17.9, |
| | | Muc17.10, |
| | | Muc17.11, |
| | | Muc17.12, |
| | | Muc17.13, |
| | | Muc17.14, |
| | | Muc17.25, |
| | | Muc17.26, |
| | | Muc17.27, |
| | | Muc17.28, |
| | | Muc17.29, |
| | | Muc17.30, |
| | | Muc17.31 |
| 104 | QIYPGDGDINYNGKFRG | HCDR2; |
| | | Muc17.3 |
| 105 | QVYPGDDDINYNGKFRG | HCDR2; |
| | | Muc17.2 |
| 106 | YISSGSSTIYYADTVKG | HCDR2; |
| | | Muc17.7, |
| | | Muc17.21, |
| | | Muc17.22, |
| | | Muc17.23, |
| | | Muc17.24 |
| 107 | HGNYVMDY | HCDR2; |
| | | Muc17.8 |
| 108 | HGNYVMDY | HCDR3; |
| | | Muc17.1, |
| | | Muc17.2, |
| | | Muc17.8, |
| | | Muc17.9, |
| | | Muc17.10, |
| | | Muc17.11, |
| | | Muc17.12, |
| | | Muc17.13, |
| | | Muc17.14, |
| | | Muc17.25, |
| | | Muc17.26, |
| | | Muc17.27, |
| | | Muc17.28, |
| | | Muc17.29, |
| | | Muc17.30, |
| | | Muc17.31 |
| 109 | QGIITSVQEFAY | HCDR3; |
| | | Muc17.4, |
| | | Muc17.6, |
| | | Muc17.15, |
| | | Muc17.16, |
| | | Muc17.17, |
| | | Muc17.18, |
| | | Muc17.19, |
| | | Muc17.31, |
| | | Muc17.32, |
| | | Muc17.33, |
| | | Muc17.34, |
| | | Muc17.35, |
| | | Muc17.36, |
| | | Muc17.37, |
| | | Muc17.38, |
| | | Muc17.39, |
| | | Muc17.40, |
| | | Muc17.41, |
| | | Muc17.42, |
| | | Muc17.43, |
| | | Muc17.44, |
| | | Muc17.45, |
| | | Muc17.46, |
| | | Muc17.48, |
| | | Muc17.49 |
| 110 | QGVITSVQEFAY | HCDR3; |
| | | Muc17.5, |
| | | Muc17.20 |
| 111 | WGYYGSSYFAY | HCDR3; |
| | | Muc17.7, |
| | | Muc17.21, |
| | | Muc17.22, |
| | | Muc17.23, |
| | | Muc17.24 |
| 112 | HGNYLMDY | HCDR3; |
| | | Muc17.3 |
| 113 | SASSSLNYIY | LCDR1; |
| | | Muc17.6 |
| 114 | SASSSVNYIF | LCDR1; |
| | | Muc17.18, |
| | | Muc17.19, |
| | | Muc17.41, |
| | | Muc17.44, |
| | | Muc17.46 |
| 115 | SASSSVNYIY | LCDR1; |
| | | Muc17.4, |
| | | Muc17.5, |
| | | Muc17.15, |
| | | Muc17.16, |
| | | Muc17.17, |
| | | Muc17.31, |
| | | Muc17.32, |
| | | Muc17.33, |
| | | Muc17.34, |
| | | Muc17.35, |
| | | Muc17.36, |
| | | Muc17.37, |
| | | Muc17.38, |
| | | Muc17.39, |
| | | Muc17.40, |
| | | Muc17.41, |
| | | Muc17.43, |
| | | Muc17.45, |
| | | Muc17.47, |
| | | Muc17.48, |
| | | Muc17.49 |
| 116 | SASSSVSYMF | LCDR1; |
| | | Muc17.1, |
| | | Muc17.2, |
| | | Muc17.8, |
| | | Muc17.9, |
| | | Muc17.10, |
| | | Muc17.11, |
| | | Muc17.12, |
| | | Muc17.13, |
| | | Muc17.14, |
| | | Muc17.25, |
| | | Muc17.26, |
| | | Muc17.27, |
| | | Muc17.28, |
| | | Muc17.29, |
| | | Muc17.30, |
| | | Muc17.31 |
| 117 | SVSSNVDYVF | LCDR1; |
| | | Muc17.3 |
| 118 | KASEDIYNRLA | LCDR1; |
| | | Muc17.7, |
| | | Muc17.21, |
| | | Muc17.22, |
| | | Muc17.23, |
| | | Muc17.24 |
| 119 | RTSNLAS | LCDR2; |
| | | Muc17.1, |
| | | Muc17.2, |
| | | Muc17.4, |
| | | Muc17.5, |
| | | Muc17.6, |
| | | Muc17.8, |
| | | Muc17.9, |
| | | Muc17.10, |
| | | Muc17.11, |
| | | Muc17.12, |
| | | Muc17.13, |
| | | Muc17.14, |
| | | Muc17.15, |
| | | Muc17.16, |
| | | Muc17.17, |
| | | Muc17.18, |
| | | Muc17.19, |
| | | Muc17.20, |
| | | Muc17.25, |
| | | Muc17.26, |
| | | Muc17.27, |
| | | Muc17.28, |
| | | Muc17.29, |
| | | Muc17.30, |
| | | Muc17.31, |
| | | Muc17.32, |
| | | Muc17.33, |
| | | Muc17.34, |
| | | Muc17.36, |
| | | Muc17.37, |
| | | Muc17.38, |
| | | Muc17.39, |
| | | Muc17.40, |
| | | Muc17.41, |
| | | Muc17.42, |
| | | Muc17.43, |
| | | Muc17.44, |
| | | Muc17.45, |
| | | Muc17.46, |
| | | Muc17.48, |
| | | Muc17.49 |
| 121 | GATNLET | LCDR2; |
| | | Muc17.7, |
| | | Muc17.21, |
| | | Muc17.22, |
| | | Muc17.23, |
| | | Muc17.24 |
| 122 | QQFHDYPRT | LCDR3; |
| | | Muc17.1, |
| | | Muc17.8, |
| | | Muc17.9, |
| | | Muc17.10, |
| | | Muc17.11, |
| | | Muc17.12, |
| | | Muc17.13, |
| | | Muc17.14, |
| | | Muc17.25, |
| | | Muc17.26, |
| | | Muc17.27, |
| | | Muc17.28, |
| | | Muc17.29, |
| | | Muc17.30, |
| | | Muc17.31 |
| 123 | QQFHSYPRT | LCDR3; |
| | | Muc17.2, |
| | | Muc17.3 |
| 124 | QQFWRTPPT | LCDR3; |
| | | Muc17.7, |
| | | Muc17.21, |
| | | Muc17.22, |
| | | Muc17.23 |
| 125 | QQYHSYPLT | LCDR3; |
| | | Muc17.4, |
| | | Muc17.5, |
| | | Muc17.6, |
| | | Muc17.15, |
| | | Muc17.16, |
| | | Muc17.17, |
| | | Muc17.18, |
| | | Muc17.19, |
| | | Muc17.20 |
| | | Muc17.31, |
| | | Muc17.32, |
| | | Muc17.33, |
| | | Muc17.34, |
| | | Muc17.35, |
| | | Muc17.36, |
| | | Muc17.37, |
| | | Muc17.38, |
| | | Muc17.39, |
| | | Muc17.40, |
| | | Muc17.41, |
| | | Muc17.42, |
| | | Muc17.43, |
| | | Muc17.44, |
| | | Muc17.45, |
| | | Muc17.47, |
| | | Muc17.48, |
| | | Muc17.49 |
| 126 | CQQFWRTPPT | LCDR3; |
| | | Muc17.24 |
| 127 | EVQLVQSGAEVKKPGESLKISCKGSGYEFSSHWMNWVRQMPGK | VH; |
| | GLEWMGQIYPGDGDINYNEKFRGQVTISADKSISTAYLQWSSLKA | Muc17.1, |
| | SDTAMYYCARHGNYVMDYWGQGTLVTVSS | Muc17.8, |
| | | Muc17.9, |
| | | Muc17.10, |
| | | Muc17.11, |
| | | Muc17.12, |
| | | Muc17.13, |
| | | Muc17.14 |
| 128 | QVQLVQSGAEVKKP/E60:J60GSSVKVSCKASGYTFTSYWLNWV | VH; |
| | RQAPGQGLEWMGMIHPSDSESRLNQKFKDRVTITADKSTSTAYM | Muc17.17 |
| | ELSSLRSEDTAVYYCARQGIITSVQEFAYWGQGTLVTVSS | |
| 129 | QVQLVQSGAEVKKPGASVKVSCKASGYEFSSHWMNWVRQAPGQ | VH; |
| | GLEWMGQIYPGDGDINYNEKFRGRVTMTRDTSTSTVYMELSSLRS | Muc17.29, |
| | EDTAVYYCARHGNYVMDYWGQGTLVTVSS | Muc17.30, |
| | | Muc17.31 |
| 130 | QVQLVQSGAEVKKPGASVKVSCKASGYTFTSYWMNWVRQAPGQ | VH; |
| | GLEWIGMIHPSDSETRLNQKFKDRVTLTVDKSSSTAYMELSSLRSE | Muc17.45 |
| | DTAVYYCARQGIITSVQEFAYWGQGTLVTVSS | |
| 131 | QVQLVQSGAEVKKPGASVKVSCKASGYTFTSYWMNWVRQAPGQ | VH; |
| | GLEWMGMIHPSDSETRLNQEFKDRVTMTRDTSTSTVYMELSSLR | Muc17.5, |
| | SEDTAVYYCARQGVITSVQEFAYWGQGTLVTVSS | Muc17.20 |
| 132 | QVQLVQSGAEVKKPGASVKVSCKASGYTFTSYWMNWVRQAPGQ | VH; |
| | GLEWMGMIHPSDSETRLNQKFKDRVTLTRDKSISTAYMELSRLRS | Muc17.37 |
| | DDTAVYYCARQGIITSVQEFAYWGQGTLVTVSS | |
| 133 | QVQLVQSGAEVKKPGASVKVSCKASGYTFTSYWMNWVRQAPGQ | VH |
| | GLEWMGMIHPSDSETRLNQKFKDRVTLTVDKSISTAYMELSRLRS | Muc17.35 |
| | DDTAVYYCARQGIITSVQEFAYWGQGTLVTVSS | |
| 134 | QVQLVQSGAEVKKPGASVKVSCKASGYTFTSYWMNWVRQAPGQ | VH; |
| | GLEWMGMIHPSDSETRLNQKFKDRVTLTVDTSISTAYMELSRLRS | Muc17.36 |
| | DDTAVYYCARQGIITSVQEFAYWGQGTLVTVSS | |
| 135 | QVQLVQSGAEVKKPGASVKVSCKASGYTFTSYWMNWVRQAPGQ | VH; |
| | GLEWMGMIHPSDSETRLNQKFKDRVTMTRDTSISTAYMELSRLRS | Muc17.23, |
| | DDTAVYYCARQGIITSVQEFAYWGQGTLVTVSS | Muc17.33, |
| | | Muc17.34 |
| 136 | QVQLVQSGAEVKKPGASVKVSCKASGYTFTSYWMNWVRQAPGQ | VH; |
| | GLEWMGMIHPSDSETRLNQKFKDRVTMTRDTSTSTVYMELSSLR | Muc17.31, |
| | SEDTAVYYCARQGIITSVQEFAYWGQGTLVTVSS | Muc17.48, |
| | | Muc17.49 |
| 137 | QVQLVQSGAEVKKPGASVKVSCKASGYTFTSYWMNWVRQAPGQ | VH; |
| | GLEWMGMIHPSDSETRLNQKFKDRVTMTVDKSISTAYMELSRLRS | Muc17.38 |
| | DDTAVYYCARQGIITSVQEFAYWGQGTLVTVSS | |
| 138 | QVQLVQSGAEVKKPGASVKVSCKASGYTFTSYWMNWVRQAPGQ | VH |
| | GLEWMGMIHPSDSETRLNQKFTDRVTMTRDTSTSTVYMELSSLRS | Muc17.6 |
| | EDTAVYYCARQGIITSVQEFAYWGQGTLVTVSS | |
| 139 | QVQLVQSGAEVKKPGSSVKVSCKASGYAFSDYWINWVRQAPGQ | VH |
| | GLEWMGQVYPGDDDINYNGKFRGRVTITADKSTSTAYMELSSLRS | Muc17.2 |
| | EDTAVYYCARHGNYVMDYWGQGTTVTVSS | |
| 140 | QVQLVQSGAEVKKPGSSVKVSCKASGYEFSSHWMNWVRQAPGQ | Vh |
| | GLEWMGQIYPGDGDINYNEKFRGRVTITADKSTSTAYMELSSLRS | Muc17.25, |
| | EDTAVYYCARHGNYVMDYWGQGTTVTVSS | Muc17.26, |
| | | Muc17.27, |
| | | Muc17.28 |
| 141 | QVQLVQSGAEVKKPGSSVKVSCKASGYIFSNHWMNWVRQAPGQ | VH; |
| | GLEWMGQIYPGDGDINYNGKFRGRVTITADKSTSTAYMELSSLRS | Muc17.3 |
| | EDTAVYYCARHGNYLMDYWGQGTTVTVSS | |
| 142 | QVQLVQSGAEVKKPGSSVKVSCKASGYTFTSYWLNWVRQAPGQ | VH; |
| | GLEWMGMIHPSDSESRLNQKFKDRVTITADKSTSTAYMELSSLRS | Mucc.17.46, |
| | EDTAVYYCARQGIITSVQEFAYWGQGTLVTVSS | Muc17.47 |
| 143 | QVQLVQSGAEVKKPGSSVKVSCKASGYTFTSYWLNWVRQAPGQ | VH; |
| | GLEWMGMIHPSDSETRLNQKFKDRVTITADKSTSTAYMELSSLRS | Muc17.42, |
| | EDTAVYYCARQGIITSVQEFAYWGQGTLVTVSS | Muc17.43, |
| | | Muc17.44 |
| 144 | QVQLVQSGAEVKKPGSSVKVSCKASGYTFTSYWMNWVRQAPGQ | VH; |
| | GLEWMGMIHPSDSESRLNQKFKDRVTITADKSTSTAYMELSSLRS | Muc17.39, |
| | EDTAVYYCARQGIITSVQEFAYWGQGTLVTVSS | Muc17.40, |
| | | Muc17.41 |
| 145 | QVQLVQSGAEVKKPGSSVKVSCKASGYTFTSYWMNWVRQAPGQ | VH; |
| | GLEWMGMIHPSDSETRLNQKFKDRVTITADKSTSTAYMELSSLRS | Muc17.4, |
| | EDTAVYYCARQGIITSVQEFAYWGQGTLVTVSS | Muc17.15, |
| | | Muc17.16, |
| | | Muc17.18, |
| | | Muc17.19 |
| 146 | EVQLVESGGGLVQPGGSLRLSCAASGFTFSSFGMHWVRQAPGK | VH; |
| | GLEWVSYISSGSSTIYYADTVKGRFTISRDNAKNSLYLQMNSLRAE | Muc17.7, |
| | DTAVYYCARWGYYGSSYFAYWGQGTLVTVSS | Muc17.21, |
| | | Muc17.22, |
| | | Muc17.23, |
| | | Muc17.24 |
| 147 | DIQMTQSPSSLSASVGDRVTITCKASEDIYNRLAWYQQKPGKAPKL | VL; |
| | LIYGATNLETGVPSRFSGSGSGTDFTFTISSLQPEDIATYYCQQFW | Muc17.24 |
| | RTPPTFGGGTKVEIK | |
| 148 | DIQMTQSPSSLSASVGDRVTITCKASEDIYNRLAWYQQKPGKAPK | VL; |
| | PLISGATNLETGVPSRFSGSGSGKDYTLTISSLQPEDIATYYCQQF | Muc17.21 |
| | WRTPPTFGGGTKVEIK | |
| 149 | DIQMTQSPSSLSASVGDRVTITCKASEDIYNRLAWYQQKPGKAPK | VL; |
| | PLISGATNLETGVPSRFSGSGSGTDFTFTISSLQPEDIATYYCQQF | Muc17.7 |
| | WRTPPTFGGGTKVEIK | |
| 150 | DIQMTQSPSSLSASVGDRVTITCKASEDIYNRLAWYQQKPGKAPK | VL; |
| | PLIYGATNLETGVPSRFSGSGSGTDFTFTISSLQPEDIATYYCQQF | Muc17.22 |
| | WRTPPTFGGGTKVEIK | |
| 151 | EIVLTQSPATLSLSPGERATLSCSASSSVNYIFVWQQKPGQAPRLLI | VL; |
| | YRTSNLASGIPARFSGSGSGTDFTLTISSLEPEDFAVYYCQQYHSY | Muc17.18 |
| | PLTFGGGTKVEIK | |
| 152 | EIVLTQSPATLSLSPGERATLSCSASSSVNYIYWYQQKPGQAPRLLI | VL; |
| | YRTSNLASGIPARFSGSGSGTDFTLTISSLEPEDFAVYYCQQYHSY | Muc17.16, |
| | PLTFGGGTKVEIK | Muc17.17, |
| | | Muc17.34, |
| | | Muc17.39, |
| | | Muc17.42, |
| | | Muc17.49 |
| 153 | EIVLTQSPATLSLSPGERATLSCSASSSVSYMFWYQQKPGQAPRL | VL; |
| | LIYRTSNLASGIPARFSGSGSGTDFTLTISSLEPEDFAVYYCQQFHD | Muc17.8, |
| | YPRTFGGGTKVEIK | Muc17.27, |
| | | Muc17.31 |
| 154 | EIVLTQSPATLSLSPGERATLSCSASSSVSYMFWYQQKPGQAPRL | VL; |
| | LIYRTSNLASGIPARFSGSGSGTDFTLTISSLEPEDFAVYYCQQFHS | Muc17.2 |
| | YPRTFGGGTKVEIK | |
| 155 | EIVLTQSPATLSLSPGERATLSCSASSSVSYMFWYQQKPGQAPRP | VL; |
| | WIYRTSNLASGIPPRFSGSGSGTDYTLTISSLEPEDFAVYYCQQFH | Muc17.28 |
| | DYPRTFGGGTKVEIK | |
| 156 | EIVLTQSPATLSLSPGERATLSCSVSSNVDYVFWYQQKPGQAPRL | VL; |
| | LIYRTSNLATGIPARFSGSGSGTDFTLTISSLEPEDFAVYYCQQFHS | Muc17.3 |
| | YPRTFGGGTKVEIK | |
| 157 | EIVLTQSPATLSVSPGERATLSCSASSSVNYIYWYQQKPGQAPRP | VL; |
| | WIYRTSNLASGIPARFSGSGSGTEYTLTISSLQSEDFAVYYCQQYH | Muc17.20 |
| | SYPLTFGGGTKVEIK | |
| 158 | EIVMTQSPATLSVSPGERATLSCSASSSLNYIYWYQQKPGQAPRLL | VL; |
| | IYRTSNLASGIPARFSGSGSGTEFTLTISSLQSEDFAVYYCQQYHS | Muc17.6 |
| | YPLTFGGGTKVEIK | |
| 159 | EIVMTQSPATLSVSPGERATLSCSASSSVNYIYWYQQKPGQAPRL | VL; |
| | LIYRTSNLASGIPARFSGSGSGTEFTLTISSLQSEDFAVYYCQQYHS | Muc17.5, |
| | YPLTFGGGTKVEIK | Muc17.15, |
| | | Muc17.33, |
| | | Muc17.45, |
| | | Muc17.48 |
| 160 | EIVMTQSPATLSVSPGERATLSCSASSSVSYMFWYQQKPGQAPRL | VL; |
| | LIYRTSNLASGIPARFSGSGSGTEFTLTISSLQSEDFAVYYCQQFHD | Muc17.14, |
| | YPRTFGGGTKVEIK | Muc17.26, |
| | | Muc17.30 |
| 161 | IQLTQSPSFLSASVGDRVTITCSASSSVSYMFWYQQKPGKAPKLLI | VL; |
| | YRTSNLASGVPPRFSGSGSGTEFTLTISSLQPEDFATYYCQQFHD | Muc17.13 |
| | YPRTFGGGTKVEIK | |
| 162 | IQLTQSPSFLSASVGDRVTITCSASSSVSYMFWYQQKPGKAPKLLI | VL; |
| | YRTSNLASGVPPRFSGSGSGTEYTLTISSLQPEDFATYYCQQFHD | Muc17.11 |
| | YPRTFGGGTKVEIKR | |
| 163 | IQLTQSPSFLSASVGDRVTITCSASSSVSYMFWYQQKPGKAPKLLI | VL; |
| | YRTSNLASGVPSRFSGSGSGTEFTLTISSLQPEDFATYYCQQFHD | Muc17.9, |
| | YPRTFGGGTKVEIK | Muc17.25, |
| | | Muc17.29 |
| 164 | IQLTQSPSFLSASVGDRVTITCSASSSVSYMFWYQQKPGKAPKLLI | VL; |
| | YRTSNLASGVPSRFSGSGSGTEYTLTISSLQPEDFATYYCQQFHD | Muc17.10 |
| | YPRTFGGGTKVEIK | |
| 165 | IQLTQSPSFLSASVGDRVTITCSASSSVSYMFWYQQKPGKAPKPW | VL; |
| | IYRTSNLASGVPPRFSGSGSGTEYTLTISSLQPEDFATYYCQQFHD | Muc17.12 |
| | YPRTFGGGTKVEIK | |
| 166 | IQLTQSPSFLSASVGDRVTITCSASSSVSYMFWYQQKPGKAPKPW | VL; |
| | IYRTSNLASGVPSRFSGSGSGTEFTLTISSLQPEDFATYYCQQFHD | Muc17.1 |
| | YPRTFGGGTKVEIK | |
| 167 | IQMTQSPSSLSASVGDRVTITCSASSSVNYIFWYQQKPGKAPKLLI | VL; |
| | YRTSNLASGVPSRFSGSGSGTDFTLTISSLQPEDFATYYCQQYHS | Muc17.19, |
| | YPLTFGGGTKVEIK | Muc17.41, |
| | | Muc17.44, |
| | | Muc17.46 |
| 168 | IQMTQSPSSLSASVGDRVTITCSASSSVNYIYWYQQKPGKAPKLLI | VL; |
| | YRTSNLASGVPSRFSGSGSGTDFTLTISSLQPEDFATYYCQQYHS | Muc17.4, |
| | YPLTFGGGTKVEIK | Muc17.31, |
| | | Muc17.32, |
| | | Muc17.35, |
| | | Muc17.36, |
| | | Muc17.387, |
| | | Muc17.38, |
| | | Muc17.40, |
| | | Muc17.43, |
| | | Muc17.47 |
| 169 | DIQMTQSPSSLSASVGDRVTITCKASEDIYNRLAWYQQKPGKAPKL | VL; |
| | LIYGATNLETGVPSRFSGSGSGKDYTLTISSLQPEDIATYYCQQFW | Muc17.23 |
| | RTPPTFGGGTKVEIK | |
| 170 | GFTFSSFGMH | HCDR1; |
| | | CLDN182.3, |
| | | CLDN182.&, |
| | | CLDN182.12, |
| | | CLDN182.13 |
| 171 | GYAFNNYWMN | HCDR1; |
| | | CLDN182.5 |
| 172 | GYAFSSYWMN | HCDR1; |
| | | CLDN182.6, |
| | | CLDN182.9, |
| | | CLDN182.15, |
| | | CLDN182.16 |
| 173 | GYTFTNFGIT | HCDR1; |
| | | CLDN182.4, |
| | | CLDN182.8, |
| | | CLDN182.10, |
| | | CLDN18.11 |
| 174 | GYTFTNSGMN | HCDR1; |
| | | CLDN182.2, |
| | | CLDN182.14, |
| | | CLDN182.17 |
| 175 | GYTFTNYGMN | HCDR1; |
| | | CLDN182.1 |
| 176 | EIYPSSGNTFYNEKFKG | HCDR2; |
| | | CLDN182.4, |
| | | CLDN182.8, |
| | | CLDN182.10, |
| | | CLDN182.11 |
| 177 | QISPGNGNSNFNGKFKG | HCDR2; |
| | | CLDN182.5 |
| 178 | QIYPGNGNSNFNGKFKA | HCDR2; |
| | | CLDN182.6, |
| | | CLDN182.9, |
| | | CLDN182.15, |
| | | CLDN182.16 |
| 179 | WINTNTGEPTFAEEFRG | HCDR2; |
| | | CLDN182.2, |
| | | CLDN182.14, |
| | | CLDN182.17 |
| 180 | WINTNTGEPTYAEEFKG | HCDR2; |
| | | CLDN182.1 |
| 181 | YISSGNSAIYYADTVNG | HCDR2; |
| | | CLDN182.3, |
| | | CLDN182.7, |
| | | CLDN182.12, |
| | | CLDN182.13 |
| 182 | GGGPLRSRYFDY | HCDR3; |
| | | CLDN182.4, |
| | | CDLN182.8, |
| | | CLDN182.10, |
| | | CLDN182.11 |
| 183 | GGRFGNAMDY | HCDR3; |
| | | CLDN182.6, |
| | | CLDN182.9, |
| | | CLDN182.15, |
| | | CLDN182.16 |
| 184 | GGRYGNAMDY | HCDR3; |
| | | CLDN182.5 |
| 185 | LRYGNSFDY | HCDR3; |
| | | CLDN182.3, |
| | | CLDN182.7, |
| | | CLDN182.12, |
| | | CLDN182.13 |
| 186 | YFYGNSFVY | HCDR3; |
| | | CLDN182.1 |
| 187 | YYYGNSFAY | HCDR3; |
| | | CLDN182.2, |
| | | CLDN182.14, |
| | | CLDN182.17 |
| 188 | KSSQSLLNSGNIQKNYLT | LCDR1; |
| | | CLDN182.1, |
| | | CLDN182.2, |
| | | CLDN182.3, |
| | | CLDN182.6, |
| | | CLDN182.7, |
| | | CLDN182.9, |
| | | CLDN182.12, |
| | | CLDN182.13, |
| | | CLDN182.14, |
| | | CLDN182.15, |
| | | CLDN182.16, |
| | | CLDN182.17 |
| 189 | KSSQSLLNSGNQRNYLT | LCDR1; |
| | | CLDN182.5 |
| 190 | RSSQSLFSSGNQKNYLT | LCDR1; |
| | | CLDN182.4, |
| | | CLDN182.8, |
| | | CLDN182.10, |
| | | CLDN182.11 |
| 191 | WASTRES | LCDR2; |
| | | CLDN182.1, |
| | | CLDN182.2, |
| | | CLDN182.3, |
| | | CLDN182.4, |
| | | CLND182.5, |
| | | CLDN182.6, |
| | | CLDN182.7, |
| | | CLDN182.8, |
| | | CLDN182.9, |
| | | CLND182.10, |
| | | CLDN182.11, |
| | | CLDN182.12, |
| | | CLDN182.13, |
| | | CLDN182.14, |
| | | CLDN182.15, |
| | | CLDN182.16, |
| | | CLDN182.17 |
| 192 | QNAYFYPYT | LCDR3; |
| | | CLDN182.5, |
| | | CLDN182.6, |
| | | CLND182.9, |
| | | CLDN182.15, |
| | | CLDN182.16 |
| 193 | QNDYYYPLT | LCDR3; |
| | | CLDN182.4, |
| | | CLDN182.8, |
| | | CLND182.10, |
| | | CLDN182.11 |
| 194 | QNNYFYPLT | LCDR3; |
| | | CLDN182.2, |
| | | CLND182.14, |
| | | CLND182.17 |
| 195 | QNNYNFPLT | LCDR3; |
| | | CLDN182.1 |
| 196 | QNNYYYPLT | LCDR3; |
| | | CLDN182.3, |
| | | CLND182.7, |
| | | CLND182.12, |
| | | CLND182.13 |
| 197 | EVQLVESGGGLVQPGGSLRLSCAASGFTFSSFGMHWVRQAPGK | VH; |
| | GLEWVAYISSGNSAIYYADTVNGRFTISRDNPKNTLYLQMNSLRAE | CLDN182.12, |
| | DTAVYYCARLRYGNSFDYWGQGTLVTVSS | CLND182.13 |
| 198 | EVQLVESGGGLVQPGGSLRLSCAASGFTFSSFGMHWVRQAPGK | VH; |
| | GLEWVSYISSGNSAIYYADTVNGRFTISRDNAKNSLYLQMNSLRAE | CLDN182.3, |
| | DTAVYYCARLRYGNSFDYWGQGTLVTVSS | CLDN182.7 |
| 199 | QIQLVQSGAEVKKPGASVKVSCKASGYTFTNSGMNWVRQAPGQ | VH; |
| | GLEWMGWINTNTGEPTFAEEFRGRVTFTLDTSASTAYMELSRLRS | CLDN182.14 |
| | DDTAVYYCARYYYGNSFAYWGQGTLVTVSS | |
| 200 | QVQLVQSGAEVKKPGASVKVSCKASGYTFTNFGITWVRQAPGQG | VH; |
| | LEWIGEIYPSSGNTFYNEKFKGRVTLTADKSSSAAYMELRSLRSDD | CLDN182.10, |
| | TAVYYCARGGGPLRSRYFDYWGQGTLVTVSS | CLND182.11 |
| 201 | QVQLVQSGAEVKKPGASVKVSCKASGYTFTNFGITWVRQAPGQG | VH; |
| | LEWMGEIYPSSGNTFYNEKFKGRVTMTTDTSTSTAYMELRSLRSD | CLDN182.4, |
| | DTAVYYCARGGGPLRSRYFDYWGQGTLVTVSS | CLND182.8 |
| 202 | QVQLVQSGAEVKKPGASVKVSCKASGYTFTNSGMNWVRQAPGQ | VH; |
| | GLEWMGWINTNTGEPTFAEEFRGRVTMTRDTSISTAYMELSRLRS | CLND182.2, |
| | DDTAVYYCARYYYGNSFAYWGQGTLVTVSS | CLND182.17 |
| 203 | QVQLVQSGAEVKKPGASVKVSCKASGYTFTNYGMNWVRQAPGQ | VH; |
| | GLEWMGWINTNTGEPTYAEEFKGRVTMTRDTSISTAYMELSRLRS | CLDN182.1 |
| | DDTAVYYCARYFYGNSFVYWGQGTLVTVSS | |
| 204 | QVQLVQSGAEVKKPGSSVKVSCKASGYAFNNYWMNWVRQAPGQ | VH; |
| | GLEWMGQISPGNGNSNFNGKFKGRVTITADKSTSTAYMELSSLRS | CLND182.5 |
| | EDTAVYYCARGGRYGNAMDYWGQGTTVTVSS | |
| 205 | QVQLVQSGAEVKKPGSSVKVSCKASGYAFSSYWMNWVRQAPGQ | VH; |
| | GLEWIGQIYPGNGNSNFNGKFKARVTLTADKSSSTAYMELSSLRS | CLND182.15, |
| | EDTAVYYCARGGRFGNAMDYWGQGTTVTVSS | CLND182.16 |
| 206 | QVQLVQSGAEVKKPGSSVKVSCKASGYAFSSYWMNWVRQAPGQ | VH; |
| | GLEWMGQIYPGNGNSNFNGKFKARVTITADKSTSTAYMELSSLRS | CLDN182.6, |
| | EDTAVYYCARGGRFGNAMDYWGQGTTVTVSS | CLDN182.9 |
| 207 | DIVMTQSPDSLAVSLGERATINCKSSQSLLNSGNQKNYLTWYQQK | VL; |
| | PGQPPKLLIFWASTRESGVPDRFSGSGSGTDFTLTISSLQAEDVAV | CLND182.7, |
| | YYCQNNYYYPLTFGGGTKVEIK | CLND182.13 |
| 206 | DIVMTQSPDSLAVSLGERATINCKSSQSLLNSGNQKNYLTWYQQK | VL; |
| | PGQPPKLLIYWASTRESGVPDRFSGSGSGTDFTLTISSLQAEDVAV | CLDN182.6, |
| | YYCQNAYFYPYTFGGGTKVEIK | CLND182.15 |
| 207 | DIVMTQSPDSLAVSLGERATINCKSSQSLLNSGNQKNYLTWYQQK | VL; |
| | PGQPPKLLIYWASTRESGVPDRFSGSGSGTDFTLTISSLQAEDVAV | CLND182.2, |
| | YYCQNNYFYPLTFGGGTKVEIK | CLND182.14, |
| | | CLND182.17 |
| 208 | DIVMTQSPDSLAVSLGERATINCKSSQSLLNSGNQKNYLTWYQQK | VL; |
| | PGQPPKLLIYWASTRESGVPDRFSGSGSGTDFTLTISSLQAEDVAV | CLND182.1 |
| | YYCQNNYNFPLTFGGGTKVEIK | |
| 209 | DIVMTQSPDSLAVSLGERATINCKSSQSLLNSGNQKNYLTWYQQK | VL; |
| | PGQPPKLLIYWASTRESGVPDRFSGSGSGTDFTLTISSLQAEDVAV | CLDN182.3, |
| | YYCQNNYYYPLTFGGGTKVEIK | CLND182.12 |
| 210 | DIVMTQSPDSLAVSLGERATINCKSSQSLLNSGNQRNYLTWYQQK | VL; |
| | PGQPPKLLIYWASTRESGVPDRFSGSGSGTDFTLTISSLQAEDVAV | CLND182.5 |
| | YYCQNAYFYPYTFGGGTKVEIK | |
| 211 | DIVMTQSPDSLAVSLGERATINCRSSQSLFSSGNQKNYLTWYQQK | VL; |
| | PGQPPKLLIYWASTRESGVPDRFSGSGSGADFTLTISSLQAEDVAV | CLDN182.8, |
| | YYCQNDYYYPLTFGGGTKVEIK | CLND182.11 |
| 212 | DIVMTQSPDSLAVSLGERATINCRSSQSLFSSGNQKNYLTWYQQK | VL; |
| | PGQPPKLLIYWASTRESGVPDRFSGSGSGTDFTLTISSLQAEDVAV | CLND812.4, |
| | YYCQNDYYYPLTFGGGTKVEIK | CLND182.10 |
| 213 | DIVMTQSPDSLAVSLGERATMNCKSSQSLLNSGNQKNYLTWYQQ | VL; |
| | KPGQPPKLLIYWASTRESGVPDRFSGSGSGTDFTLTISSLQAEDVA | CLND182.9, |
| | VYYCQNAYFYPYTFGGGTKVEIK | CLND182.16 |
| 214 | SGGGGS | 1xG4S |
| 215 | GGGGSGGGGSGGGGS | 3xG4S |
| 216 | GKPGSGKPGSGKPGSGKPGS | CL |
| 217 | ASTKGPSVFPLAPSSKSTSGGTAALGCLVKDYFPEPVTVSWNSGA | CH1-3 IgG1 |
| | LTSGVHTFPAVLQSSGLYSLSSVVTVPSSSLGTQTYICNVNHKPSN | |
| | TKVDKRVEPKSCDKTHTCPPCPAPELLGGPSVFLFPPKPKDTLMIS | |
| | RTPEVTCVVVDVSHEDPEVKFNWYVDGVEVHNAKTKPREEQYNS | |
| | TYRVVSVLTVLHQDWLNGKEYKCKVSNKALPAPIEKTISKAKGQPR | |
| | EPQVYTLPPSRDELTKNQVSLTCLVKGFYPSDIAVEWESNGQPEN | |
| | NYKTTPPVLDSDGSFFLYSKLTVDKSRWQQGNVFSCSVMHEALH | |
| | NHYTQKSLSLSPGK | |
| 218 | ASTKGPSVFPLAPSSKSTSGGTAALGCLVKDYFPEPVTVSWNSGA | CH1-3 IgG1 |
| | LTSGVHTFPAVLQSSGLYSLSSVVTVPSSSLGTQTYICNVNHKPSN | (N297A) |
| | TKVDKRVEPKSCDKTHTCPPCPAPELLGGPSVFLFPPKPKDTLMIS | |
| | RTPEVTCVVVDVSHEDPEVKFNWYVDGVEVHNAKTKPREEQYAS | |
| | TYRVVSVLTVLHQDWLNGKEYKCKVSNKALPAPIEKTISKAKGQPR | |
| | EPQVYTLPPSRDELTKNQVSLTCLVKGFYPSDIAVEWESNGQPEN | |
| | NYKTTPPVLDSDGSFFLYSKLTVDKSRWQQGNVFSCSVMHEALH | |
| | NHYTQKSLSLSPGK | |
| 219 | ASTKGPSVFPLAPSSKSTSGGTAALGCLVKDYFPEPVTVSWNSGA | CH1-3 IgG1 |
| | LTSGVHTFPAVLQSSGLYSLSSVVTVPSSSLGTQTYICNVNHKPSN | (L234F/ |
| | TKVDKRVEPKSCDKTHTCPPCPAPEFEGGPSVFLFPPKPKDTLMIS | L235E/ |
| | RTPEVTCVVVDVSHEDPEVKFNWYVDGVEVHNAKTKPREEQYNS | P331S) |
| | TYRVVSVLTVLHQDWLNGKEYKCKVSNKALPASIEKTISKAKGQPR | |
| | EPQVYTLPPSRDELTKNQVSLTCLVKGFYPSDIAVEWESNGQPEN | |
| | NYKTTPPVLDSDGSFFLYSKLTVDKSRWQQGNVFSCSVMHEALH | |
| | NHYTQKSLSLSPGK | |
| 220 | ASTKGPSVFPLAPSSKSTSGGTAALGCLVKDYFPEPVTVSWNSGA | CH1-3 IgG1 |
| | LTSGVHTFPAVLQSSGLYSLSSVVTVPSSSLGTQTYICNVNHKPSN | (Y349C/ |
| | TKVDKRVEPKSCDKTHTCPPCPAPELLGGPSVFLFPPKPKDTLMIS | K370E/ |
| | RTPEVTCVVVDVSHEDPEVKFNWYVDGVEVHNAKTKPREEQYNS | K409D/ |
| | TYRVVSVLTVLHQDWLNGKEYKCKVSNKALPAPIEKTISKAKGQPR | K439E) |
| | EPQVCTLPPSRDELTKNQVSLTCLVEGFYPSDIAVEWESNGQPEN | |
| | NYKTTPPVLDSDGSFFLYSDLTVDKSRWQQGNVFSCSVMHEALH | |
| | NHYTQESLSLSPGK | |
| 221 | ASTKGPSVFPLAPSSKSTSGGTAALGCLVKDYFPEPVTVSWNSGA | CH1-3 IgG1 |
| | LTSGVHTFPAVLQSSGLYSLSSVVTVPSSSLGTQTYICNVNHKPSN | (S354C/ |
| | TKVDKRVEPKSCDKTHTCPPCPAPELLGGPSVFLFPPKPKDTLMIS | D356K/ |
| | RTPEVTCVVVDVSHEDPEVKFNWYVDGVEVHNAKTKPREEQYNS | E357K/ |
| | TYRVVSVLTVLHQDWLNGKEYKCKVSNKALPAPIEKTISKAKGQPR | D399K) |
| | EPQVYTLPPCRKKLTKNQVSLTCLVKGFYPSDIAVEWESNGQPEN | |
| | NYKTTPPVLKSDGSFFLYSKLTVDKSRWQQGNVFSCSVMHEALH | |
| | NHYTQKSLSLSPGK | |
| 222 | ASTKGPSVFPLAPSSKSTSGGTAALGCLVKDYFPEPVTVSWNSGA | CH1-3 IgG1 |
| | LTSGVHTFPAVLQSSGLYSLSSVVTVPSSSLGTQTYICNVNHKPSN | (S354C/ |
| | TKVDKRVEPKSCDKTHTCPPCPAPELLGGPSVFLFPPKPKDTLMIS | T366W) |
| | RTPEVTCVVVDVSHEDPEVKFNWYVDGVEVHNAKTKPREEQYNS | |
| | TYRVVSVLTVLHQDWLNGKEYKCKVSNKALPAPIEKTISKAKGQPR | |
| | EPQVYTLPPSRDELTKNQVSLWCLVKGFYPSDIAVEWESNGQPEN | |
| | NYKTTPPVLDSDGSFFLYSKLTVDKSRWQQGNVFSCSVMHEALH | |
| | NHYTQKSLSLSPGK | |
| 223 | ASTKGPSVFPLAPSSKSTSGGTAALGCLVKDYFPEPVTVSWNSGA | CH1-3 IgG1 |
| | LTSGVHTFPAVLQSSGLYSLSSVVTVPSSSLGTQTYICNVNHKPSN | (Y349C/ |
| | TKVDKRVEPKSCDKTHTCPPCPAPELLGGPSVFLFPPKPKDTLMIS | T366S/ |
| | RTPEVTCVVVDVSHEDPEVKFNWYVDGVEVHNAKTKPREEQYNS | L368A/ |
| | TYRVVSVLTVLHQDWLNGKEYKCKVSNKALPAPIEKTISKAKGQPR | Y407V) |
| | EPQVYTLPPSRDELTKNQVSLSCAVKGFYPSDIAVEWESNGQPEN | |
| | NYKTTPPVLDSDGSFFLVSKLTVDKSRWQQGNVFSCSVMHEALH | |
| | NHYTQKSLSLSPGK | |
| 224 | ASTKGPSVFPLAPSSKSTSGGTAALGCLVKDYFPEPVTVSWNSGA | CH1-3 IgG1 |
| | LTSGVHTFPAVLQSSGLYSLSSVVTVPSSSLGTQTYICNVNHKPSN | (L234F/ |
| | TKVDKRVEPKSCDKTHTCPPCPAPEFEGGPSVFLFPPKPKDTLMIS | L235E/ |
| | RTPEVTCVVVDVSHEDPEVKFNWYVDGVEVHNAKTKPREEQYNS | P331S/ |
| | TYRVVSVLTVLHQDWLNGKEYKCKVSNKALPASIEKTISKAKGQPR | Y349C/ |
| | EPQVCTLPPSRDELTKNQVSLTCLVEGFYPSDIAVEWESNGQPEN | K370E/ |
| | NYKTTPPVLDSDGSFFLYSDLTVDKSRWQQGNVFSCSVMHEALH | K409D/ |
| | NHYTQESLSLSPGK | K439E) |
| 225 | ASTKGPSVFPLAPSSKSTSGGTAALGCLVKDYFPEPVTVSWNSGA | CH1-3 IgG1 |
| | LTSGVHTFPAVLQSSGLYSLSSVVTVPSSSLGTQTYICNVNHKPSN | (L234F/ |
| | TKVDKRVEPKSCDKTHTCPPCPAPEFEGGPSVFLFPPKPKDTLMIS | L235E/ |
| | RTPEVTCVVVDVSHEDPEVKFNWYVDGVEVHNAKTKPREEQYNS | P331S/ |
| | TYRVVSVLTVLHQDWLNGKEYKCKVSNKALPASIEKTISKAKGQPR | S354C/ |
| | EPQVYTLPPCRKKLTKNQVSLTCLVKGFYPSDIAVEWESNGQPEN | D356K/ |
| | NYKTTPPVLKSDGSFFLYSKLTVDKSRWQQGNVFSCSVMHEALH | E357K/ |
| | NHYTQKSLSLSPGK | D399K) |
| 226 | ASTKGPSVFPLAPSSKSTSGGTAALGCLVKDYFPEPVTVSWNSGA | CH1-3 IgG1 |
| | LTSGVHTFPAVLQSSGLYSLSSVVTVPSSSLGTQTYICNVNHKPSN | (L234F/ |
| | TKVDKRVEPKSCDKTHTCPPCPAPEFEGGPSVFLFPPKPKDTLMIS | L235E/ |
| | RTPEVTCVVVDVSHEDPEVKFNWYVDGVEVHNAKTKPREEQYNS | P331S/ |
| | TYRVVSVLTVLHQDWLNGKEYKCKVSNKALPASIEKTISKAKGQPR | S354C/ |
| | EPQVYTLPPSRDELTKNQVSLWCLVKGFYPSDIAVEWESNGQPEN | T366W) |
| | NYKTTPPVLDSDGSFFLYSKLTVDKSRWQQGNVFSCSVMHEALH | |
| | NHYTQKSLSLSPGK | |
| 227 | ASTKGPSVFPLAPSSKSTSGGTAALGCLVKDYFPEPVTVSWNSGA | CH1-3 IgG1 |
| | LTSGVHTFPAVLQSSGLYSLSSVVTVPSSSLGTQTYICNVNHKPSN | (L234F/ |
| | TKVDKRVEPKSCDKTHTCPPCPAPEFEGGPSVFLFPPKPKDTLMIS | L235E/ |
| | RTPEVTCVVVDVSHEDPEVKFNWYVDGVEVHNAKTKPREEQYNS | P331S/ |
| | TYRVVSVLTVLHQDWLNGKEYKCKVSNKALPASIEKTISKAKGQPR | Y349C/ |
| | EPQVYTLPPSRDELTKNQVSLSCAVKGFYPSDIAVEWESNGQPEN | T366S/ |
| | NYKTTPPVLDSDGSFFLVSKLTVDKSRWQQGNVFSCSVMHEALH | L368A/ |
| | NHYTQKSLSLSPGK | Y407V) |
| 228 | ASTKGPSVFPLAPSSKSTSGGTAALGCLVKDYFPEPVTVSWNSGA | CH1-3 IgG1 |
| | LTSGVHTFPAVLQSSGLYSLSSVVTVPSSSLGTQTYICNVNHKPSN | (N297A/ |
| | TKVDKRVEPKSCDKTHTCPPCPAPELLGGPSVFLFPPKPKDTLMIS | Y349C/ |
| | RTPEVTCVVVDVSHEDPEVKFNWYVDGVEVHNAKTKPREEQYAS | K370E/ |
| | TYRVVSVLTVLHQDWLNGKEYKCKVSNKALPAPIEKTISKAKGQPR | K409D/ |
| | EPQVCTLPPSRDELTKNQVSLTCLVEGFYPSDIAVEWESNGQPEN | K439E) |
| | NYKTTPPVLDSDGSFFLYSDLTVDKSRWQQGNVFSCSVMHEALH | |
| | NHYTQESLSLSPGK | |
| 229 | ASTKGPSVFPLAPSSKSTSGGTAALGCLVKDYFPEPVTVSWNSGA | CH1-3 IgG1 |
| | LTSGVHTFPAVLQSSGLYSLSSVVTVPSSSLGTQTYICNVNHKPSN | (N297A/ |
| | TKVDKRVEPKSCDKTHTCPPCPAPELLGGPSVFLFPPKPKDTLMIS | S354C/ |
| | RTPEVTCVVVDVSHEDPEVKFNWYVDGVEVHNAKTKPREEQYAS | D356K/ |
| | TYRVVSVLTVLHQDWLNGKEYKCKVSNKALPAPIEKTISKAKGQPR | E357K/ |
| | EPQVYTLPPCRKKLTKNQVSLTCLVKGFYPSDIAVEWESNGQPEN | D399K) |
| | NYKTTPPVLKSDGSFFLYSKLTVDKSRWQQGNVFSCSVMHEALH | |
| | NHYTQKSLSLSPGK | |
| 230 | ASTKGPSVFPLAPSSKSTSGGTAALGCLVKDYFPEPVTVSWNSGA | CH1-3 IgG1 |
| | LTSGVHTFPAVLQSSGLYSLSSVVTVPSSSLGTQTYICNVNHKPSN | (N297A/ |
| | TKVDKRVEPKSCDKTHTCPPCPAPELLGGPSVFLFPPKPKDTLMIS | S354C/ |
| | RTPEVTCVVVDVSHEDPEVKFNWYVDGVEVHNAKTKPREEQYAS | T366W) |
| | TYRVVSVLTVLHQDWLNGKEYKCKVSNKALPAPIEKTISKAKGQPR | |
| | EPQVYTLPPSRDELTKNQVSLWCLVKGFYPSDIAVEWESNGQPEN | |
| | NYKTTPPVLDSDGSFFLYSKLTVDKSRWQQGNVFSCSVMHEALH | |
| | NHYTQKSLSLSPGK | |
| 231 | ASTKGPSVFPLAPSSKSTSGGTAALGCLVKDYFPEPVTVSWNSGA | CH1-3 IgG1 |
| | LTSGVHTFPAVLQSSGLYSLSSVVTVPSSSLGTQTYICNVNHKPSN | (N297A/ |
| | TKVDKRVEPKSCDKTHTCPPCPAPELLGGPSVFLFPPKPKDTLMIS | Y349C/ |
| | RTPEVTCVVVDVSHEDPEVKFNWYVDGVEVHNAKTKPREEQYAS | T366S/ |
| | TYRVVSVLTVLHQDWLNGKEYKCKVSNKALPAPIEKTISKAKGQPR | L368A/ |
| | EPQVYTLPPSRDELTKNQVSLSCAVKGFYPSDIAVEWESNGQPEN | Y407V) |
| | NYKTTPPVLDSDGSFFLVSKLTVDKSRWQQGNVFSCSVMHEALH | |
| | NHYTQKSLSLSPGK | |
| 232 | EPKSSDKTHTCPPCPAPELLGGPSVFLFPPKPKDTLMISRTPEVTC | Fc IgG1 |
| | VVVDVSHEDPEVKFNWYVDGVEVHNAKTKPREEQYNSTYRVVSV | |
| | LTVLHQDWLNGKEYKCKVSNKALPAPIEKTISKAKGQPREPQVYTL | |
| | PPSRDELTKNQVSLTCLVKGFYPSDIAVEWESNGQPENNYKTTPP | |
| | VLDSDGSFFLYSKLTVDKSRWQQGNVFSCSVMHEALHNHYTQKS | |
| | LSLSPGK | |
| 233 | EPKSSDKTHTCPPCPAPELLGGPSVFLFPPKPKDTLMISRTPEVTC | Fc IgG1 |
| | VVVDVSHEDPEVKFNWYVDGVEVHNAKTKPREEQYASTYRVVSV | (N297A) |
| | LTVLHQDWLNGKEYKCKVSNKALPAPIEKTISKAKGQPREPQVYTL | |
| | PPSRDELTKNQVSLTCLVKGFYPSDIAVEWESNGQPENNYKTTPP | |
| | VLDSDGSFFLYSKLTVDKSRWQQGNVFSCSVMHEALHNHYTQKS | |
| | LSLSPGK | |
| 234 | EPKSSDKTHTCPPCPAPEFEGGPSVFLFPPKPKDTLMISRTPEVTC | Fc IgG1 |
| | VVVDVSHEDPEVKFNWYVDGVEVHNAKTKPREEQYNSTYRVVSV | (L234F/ |
| | LTVLHQDWLNGKEYKCKVSNKALPASIEKTISKAKGQPREPQVYTL | L235E/ |
| | PPSRDELTKNQVSLTCLVKGFYPSDIAVEWESNGQPENNYKTTPP | P331S) |
| | VLDSDGSFFLYSKLTVDKSRWQQGNVFSCSVMHEALHNHYTQKS | |
| | LSLSPGK | |
| 235 | EPKSSDKTHTCPPCPAPELLGGPSVFLFPPKPKDTLMISRTPEVTC | Fc IgG1 |
| | VVVDVSHEDPEVKFNWYVDGVEVHNAKTKPREEQYNSTYRVVSV | (Y349C/ |
| | LTVLHQDWLNGKEYKCKVSNKALPAPIEKTISKAKGQPREPQVCTL | K370E/ |
| | PPSRDELTKNQVSLTCLVEGFYPSDIAVEWESNGQPENNYKTTPP | K409D/ |
| | VLDSDGSFFLYSDLTVDKSRWQQGNVFSCSVMHEALHNHYTQES | K439E) |
| | LSLSPGK | |
| 236 | EPKSSDKTHTCPPCPAPELLGGPSVFLFPPKPKDTLMISRTPEVTC | Fc IgG1 |
| | VVVDVSHEDPEVKFNWYVDGVEVHNAKTKPREEQYNSTYRVVSV | (S354C/ |
| | LTVLHQDWLNGKEYKCKVSNKALPAPIEKTISKAKGQPREPQVYTL | D356K/ |
| | PPCRKKLTKNQVSLTCLVKGFYPSDIAVEWESNGQPENNYKTTPP | E357K/ |
| | VLKSDGSFFLYSKLTVDKSRWQQGNVFSCSVMHEALHNHYTQKS | D399K) |
| | LSLSPGK | |
| 237 | EPKSSDKTHTCPPCPAPELLGGPSVFLFPPKPKDTLMISRTPEVTC | Fc IgG1 |
| | VVVDVSHEDPEVKFNWYVDGVEVHNAKTKPREEQYNSTYRVVSV | (S354C/ |
| | LTVLHQDWLNGKEYKCKVSNKALPAPIEKTISKAKGQPREPQVYTL | T366W) |
| | PPSRDELTKNQVSLWCLVKGFYPSDIAVEWESNGQPENNYKTTPP | |
| | VLDSDGSFFLYSKLTVDKSRWQQGNVFSCSVMHEALHNHYTQKS | |
| | LSLSPGK | |
| 238 | EPKSSDKTHTCPPCPAPELLGGPSVFLFPPKPKDTLMISRTPEVTC | Fc IgG1 |
| | VVVDVSHEDPEVKFNWYVDGVEVHNAKTKPREEQYNSTYRVVSV | (Y349C/ |
| | LTVLHQDWLNGKEYKCKVSNKALPAPIEKTISKAKGQPREPQVYTL | T366S/ |
| | PPSRDELTKNQVSLSCAVKGFYPSDIAVEWESNGQPENNYKTTPP | L368A/ |
| | VLDSDGSFFLVSKLTVDKSRWQQGNVFSCSVMHEALHNHYTQKS | Y407V) |
| | LSLSPGK | |
| 239 | EPKSSDKTHTCPPCPAPEFEGGPSVFLFPPKPKDTLMISRTPEVTC | Fc IgG1 |
| | VVVDVSHEDPEVKFNWYVDGVEVHNAKTKPREEQYNSTYRVVSV | (L234F/ |
| | LTVLHQDWLNGKEYKCKVSNKALPASIEKTISKAKGQPREPQVCTL | L235E/ |
| | PPSRDELTKNQVSLTCLVEGFYPSDIAVEWESNGQPENNYKTTPP | P331S/ |
| | VLDSDGSFFLYSDLTVDKSRWQQGNVFSCSVMHEALHNHYTQES | Y349C/ |
| | LSLSPGK | K370E/ |
| | | K409D/ |
| | | K439E) |
| 240 | EPKSSDKTHTCPPCPAPEFEGGPSVFLFPPKPKDTLMISRTPEVTC | Fc IgG1 |
| | VVVDVSHEDPEVKFNWYVDGVEVHNAKTKPREEQYNSTYRVVSV | (L234F/ |
| | LTVLHQDWLNGKEYKCKVSNKALPASIEKTISKAKGQPREPQVYTL | L235E/ |
| | PPCRKKLTKNQVSLTCLVKGFYPSDIAVEWESNGQPENNYKTTPP | P331S/ |
| | VLKSDGSFFLYSKLTVDKSRWQQGNVFSCSVMHEALHNHYTQKS | S354C/ |
| | LSLSPGK | D356K/ |
| | | E357K/ |
| | | D399K) |
| 241 | EPKSSDKTHTCPPCPAPEFEGGPSVFLFPPKPKDTLMISRTPEVTC | Fc IgG1 |
| | VVVDVSHEDPEVKFNWYVDGVEVHNAKTKPREEQYNSTYRVVSV | (L234F/ |
| | LTVLHQDWLNGKEYKCKVSNKALPASIEKTISKAKGQPREPQVYTL | L235E/ |
| | PPSRDELTKNQVSLWCLVKGFYPSDIAVEWESNGQPENNYKTTPP | P331S/ |
| | VLDSDGSFFLYSKLTVDKSRWQQGNVFSCSVMHEALHNHYTQKS | S354C/ |
| | LSLSPGK | T366W) |
| 242 | EPKSSDKTHTCPPCPAPEFEGGPSVFLFPPKPKDTLMISRTPEVTC | Fc IgG1 |
| | VVVDVSHEDPEVKFNWYVDGVEVHNAKTKPREEQYNSTYRVVSV | (L234F/ |
| | LTVLHQDWLNGKEYKCKVSNKALPASIEKTISKAKGQPREPQVYTL | L235E/ |
| | PPSRDELTKNQVSLSCAVKGFYPSDIAVEWESNGQPENNYKTTPP | P331S/ |
| | VLDSDGSFFLVSKLTVDKSRWQQGNVFSCSVMHEALHNHYTQKS | Y349C/ |
| | LSLSPGK | T366S/ |
| | | L368A/ |
| | | Y407V) |
| 243 | EPKSSDKTHTCPPCPAPELLGGPSVFLFPPKPKDTLMISRTPEVTC | Fc IgG1 |
| | VVVDVSHEDPEVKFNWYVDGVEVHNAKTKPREEQYASTYRVVSV | (N297A/ |
| | LTVLHQDWLNGKEYKCKVSNKALPAPIEKTISKAKGQPREPQVCTL | Y349C/ |
| | PPSRDELTKNQVSLTCLVEGFYPSDIAVEWESNGQPENNYKTTPP | K370E/ |
| | VLDSDGSFFLYSDLTVDKSRWQQGNVFSCSVMHEALHNHYTQES | K409D/ |
| | LSLSPGK | K439E) |
| 244 | EPKSSDKTHTCPPCPAPELLGGPSVFLFPPKPKDTLMISRTPEVTC | Fc IgG1 |
| | VVVDVSHEDPEVKFNWYVDGVEVHNAKTKPREEQYASTYRVVSV | (N297A/ |
| | LTVLHQDWLNGKEYKCKVSNKALPAPIEKTISKAKGQPREPQVYTL | S354C/ |
| | PPCRKKLTKNQVSLTCLVKGFYPSDIAVEWESNGQPENNYKTTPP | D356K/ |
| | VLKSDGSFFLYSKLTVDKSRWQQGNVFSCSVMHEALHNHYTQKS | E357K/ |
| | LSLSPGK | D399K) |
| 245 | EPKSSDKTHTCPPCPAPELLGGPSVFLFPPKPKDTLMISRTPEVTC | Fc IgG1 |
| | VVVDVSHEDPEVKFNWYVDGVEVHNAKTKPREEQYASTYRVVSV | (N297A/ |
| | LTVLHQDWLNGKEYKCKVSNKALPAPIEKTISKAKGQPREPQVYTL | S354C/ |
| | PPSRDELTKNQVSLWCLVKGFYPSDIAVEWESNGQPENNYKTTPP | T366W) |
| | VLDSDGSFFLYSKLTVDKSRWQQGNVFSCSVMHEALHNHYTQKS | |
| | LSLSPGK | |
| 246 | EPKSSDKTHTCPPCPAPELLGGPSVFLFPPKPKDTLMISRTPEVTC | Fc IgG1 |
| | VVVDVSHEDPEVKFNWYVDGVEVHNAKTKPREEQYASTYRVVSV | (N297A/ |
| | LTVLHQDWLNGKEYKCKVSNKALPAPIEKTISKAKGQPREPQVYTL | Y349C/ |
| | PPSRDELTKNQVSLSCAVKGFYPSDIAVEWESNGQPENNYKTTPP | T366S/ |
| | VLDSDGSFFLVSKLTVDKSRWQQGNVFSCSVMHEALHNHYTQKS | L368A/ |
| | LSLSPGK | Y407V) |
| 247 | RTVAAPSVFIFPPSDEQLKSGTASVVCLLNNFYPREAKVQWKVDN | CL1 |
| | ALQSGNSQESVTEQDSKDSTYSLSSTLTLSKADYEKHKVYACEVT | |
| | HQGLSSPVTKSFNRGEC | |
| 248 | EVOLVESGGGLVQPKGSLKLSCAASGFTFNTYAMNWVRQAPGKG | VH; |
| | LEWVARIRSKYNNYATYYADSVKDRFTISRDDSQSILYLQMNNLKT | CD3vA |
| | EDTAMYYCVRHGNFGNSYVSWFAYWGQGTLVTVSS | |
| 249 | EVQLVESGGGLVQPGGSLRLSCAASGFTFSTYAMNWVRQAPGK | VH; |
| | GLEWVGRIRSKANNYATYYADSVKGRFTISRDDSKNTLYLQMNSL | CD3vB |
| | RAEDTAVYYCVRHGNFGDSYVSWFAYWGQGTLVTVSS | |
| 250 | EVQLVESGGGLVQPGGSLRLSCAASGFTFSTYAMNWVRQAPGK | VH; |
| | GLEWVGRIRSKYNNYATYYADSVKGRFTISRDDSKNTLYLQMNSL | CD3vC |
| | RAEDTAVYYCVRHGNFGDSYVSWFAYWGQGTLVTVSS | |
| 251 | EVQLVESGGGLVQPGGSLRLSCAASGFTFSTYAMNWVRQAPGK | VH; |
| | GLEWVGRIRSKINNYATYYADSVKGRFTISRDDSKNTLYLQMNSLR | CD3vD |
| | AEDTAVYYCVRHGNFGDSYVSWFAYWGQGTLVTVSS | |
| 252 | EVQLVESGGGLVQPGGSLRLSCAASGFTFSTYAMNWVRQAPGK | VH; |
| | GLEWVGRIRSKLNNYATYYADSVKGRFTISRDDSKNTLYLQMNSL | CD3vE |
| | RAEDTAVYYCVRHGNFGDSYVSWFAYWGQGTLVTVSS | |
| 253 | EVQLVESGGGLVQPGGSLRLSCAASGFTFSTYAMNWVRQAPGK | VH; |
| | GLEWVGRIRSKVNNYATYYADSVKGRFTISRDDSKNTLYLQMNSL | CD3vF |
| | RAEDTAVYYCVRHGNFGDSYVSWFAYWGQGTLVTVSS | |
| 254 | EVQLVESGGGLVQPGGSLRLSCAASGFTFSTYAMNWVRQAPGK | VH; |
| | GLEWVGRIRSKSNNYATYYADSVKGRFTISRDDSKNTLYLQMNSL | CD3vG |
| | RAEDTAVYYCVRHGNFGDSYVSWFAYWGQGTLVTVSS | |
| 255 | EVQLVESGGGLVQPGGSLRLSCAASGFTFSTYAMDWVRQAPGK | VH; |
| | GLEWVGRIRSKYNNYATYYADSVKGRFTISRDDSKNTLYLQMNSL | CD3vH |
| | RAEDTAVYYCVRHGNFGDSYVSWFAYWGQGTLVTVSS | |
| 256 | EVQLVESGGGLVQPGGSLRLSCAASGFTFSTYAMNWVRQAPGK | VH; |
| | GLEWVGRIRSKYNNYATYYADSVKGRFTISRDDSKNTLYLQMNSL | CD3vI |
| | RAEDTAVYYCVRHGNFGDSYVSWFEYWGQGTLVTVSS | |
| 257 | EVQLVESGGGLVQPGGSLRLSCAASGFTFSTYAMNWVRQAPGK | VH; |
| | GLEWVGRIRSKYNNYATYYADSVKGRFTISRDDSKNTLYLQMNSL | CD3vJ |
| | RAEDTAVYYCVRHGNFGDSYVSWFDYWGQGTLVTVSS | |
| 258 | EVQLVESGGGLVQPGGSLRLSCAASGFTFSTYAMNWVRQAPGK | VH; |
| | GLEWVGRIRSKYNNYATYYADSVKGRFTISRDDSKNTLYLQMNSL | CD3vK |
| | RAEDTAVYYCVRHGNFGDSYVSWFNYWGQGTLVTVSS | |
| 259 | EVQLVESGGGLVQPGGSLRLSCAASGFTFSTYAMNWVRQAPGK | VH; |
| | GLEWVGRIRSKYNNYATYYADSVKGRFTISRDDSKNTLYLQMNSL | CD3vL |
| | RAEDTAVYYCVRHGNFGDSYVSYFAYWGQGTLVTVSS | |
| 260 | QLVESGGGLVQPGGSLRLSCAASGFTFSTYAMNWVRQAPGKGLE | VH; |
| | WVGRIRSKANNYATYYADSVKGRFTISRDDSKNTLYLQMNSLRAE | CD3vB2 |
| | DTAVYYCVRHGNFGDSYVSWFAYWGQGTLVTVSS | |
| 261 | QAVVTQEPSLTVSPGGTVTLTCGSSTGAVTTSNYANWVQQKPGK | VL; |
| | SPRGLIGGTNKRAPGVPARFSGSLLGGKAALTISGAQPEDEADYY | CD3 |
| | CALWYSNHWVFGGGTKLTVL | |
| 262 | EVQLVESGGGLVQPGGSLRLSCAASGFTFSTYAMNWVRQAPGK | CD3vB |
| | GLEWVGRIRSKANNYATYYADSVKGRFTISRDDSKNTLYLQMNSL | scfv-Fc |
| | RAEDTAVYYCVRHGNFGDSYVSWFAYWGQGTLVTVSSGKPGSG | |
| | KPGSGKPGSGKPGSQAVVTQEPSLTVSPGGTVTLTCGSSTGAVT | |
| | TSNYANWVQQKPGKSPRGLIGGTNKRAPGVPARFSGSLLGGKAA | |
| | LTISGAQPEDEADYYCALWYSNHWVFGGGTKLTVLEPKSSDKTHT | |
| | CPPCPAPEFEGGPSVFLFPPKPKDTLMISRTPEVTCVVVDVSHED | |
| | PEVKFNWYVDGVEVHNAKTKPREEQYNSTYRVVSVLTVLHQDWL | |
| | NGKEYKCKVSNKALPASIEKTISKAKGQPREPQVYTLPPCRKKLTK | |
| | NQVSLTCLVKGFYPSDIAVEWESNGQPENNYKTTPPVLKSDGSFF | |
| | LYSKLTVDKSRWQQGNVFSCSVMHEALHNHYTQKSLSLSPGK | |
| 263 | EVQLVESGGGLVQPGGSLRLSCAASGFTFSTYAMNWVRQAPGK | CD3vC |
| | GLEWVGRIRSKYNNYATYYADSVKGRFTISRDDSKNTLYLQMNSL | scfv-Fc |
| | RAEDTAVYYCVRHGNFGDSYVSWFAYWGQGTLVTVSSGKPGSG | |
| | KPGSGKPGSGKPGSQAVVTQEPSLTVSPGGTVTLTCGSSTGAVT | |
| | TSNYANWVQQKPGKSPRGLIGGTNKRAPGVPARFSGSLLGGKAA | |
| | LTISGAQPEDEADYYCALWYSNHWVFGGGTKLTVLEPKSSDKTHT | |
| | CPPCPAPEFEGGPSVFLFPPKPKDTLMISRTPEVTCVVVDVSHED | |
| | PEVKFNWYVDGVEVHNAKTKPREEQYNSTYRVVSVLTVLHQDWL | |
| | NGKEYKCKVSNKALPASIEKTISKAKGQPREPQVYTLPPCRKKLTK | |
| | NQVSLTCLVKGFYPSDIAVEWESNGQPENNYKTTPPVLKSDGSFF | |
| | LYSKLTVDKSRWQQGNVFSCSVMHEALHNHYTQKSLSLSPGK | |
| 264 | EVQLVESGGGLVQPGGSLRLSCAASGFTFSTYAMNWVRQAPGK | CD3vD |
| | GLEWVGRIRSKINNYATYYADSVKGRFTISRDDSKNTLYLQMNSLR | scfv-Fc |
| | AEDTAVYYCVRHGNFGDSYVSWFAYWGQGTLVTVSSGKPGSGK | |
| | PGSGKPGSGKPGSQAVVTQEPSLTVSPGGTVTLTCGSSTGAVTT | |
| | SNYANWVQQKPGKSPRGLIGGTNKRAPGVPARFSGSLLGGKAAL | |
| | TISGAQPEDEADYYCALWYSNHWVFGGGTKLTVLEPKSSDKTHTC | |
| | PPCPAPEFEGGPSVFLFPPKPKDTLMISRTPEVTCVVVDVSHEDPE | |
| | VKFNWYVDGVEVHNAKTKPREEQYNSTYRVVSVLTVLHQDWLNG | |
| | KEYKCKVSNKALPASIEKTISKAKGQPREPQVYTLPPCRKKLTKNQ | |
| | VSLTCLVKGFYPSDIAVEWESNGQPENNYKTTPPVLKSDGSFFLY | |
| | SKLTVDKSRWQQGNVFSCSVMHEALHNHYTQKSLSLSPGK | |
| 265 | EVQLVESGGGLVQPGGSLRLSCAASGFTFSTYAMNWVRQAPGK | CD3vE |
| | GLEWVGRIRSKLNNYATYYADSVKGRFTISRDDSKNTLYLQMNSL | scfv-Fc |
| | RAEDTAVYYCVRHGNFGDSYVSWFAYWGQGTLVTVSSGKPGSG | |
| | KPGSGKPGSGKPGSQAVVTQEPSLTVSPGGTVTLTCGSSTGAVT | |
| | TSNYANWVQQKPGKSPRGLIGGTNKRAPGVPARFSGSLLGGKAA | |
| | LTISGAQPEDEADYYCALWYSNHWVFGGGTKLTVLEPKSSDKTHT | |
| | CPPCPAPEFEGGPSVFLFPPKPKDTLMISRTPEVTCVVVDVSHED | |
| | PEVKFNWYVDGVEVHNAKTKPREEQYNSTYRVVSVLTVLHQDWL | |
| | NGKEYKCKVSNKALPASIEKTISKAKGQPREPQVYTLPPCRKKLTK | |
| | NQVSLTCLVKGFYPSDIAVEWESNGQPENNYKTTPPVLKSDGSFF | |
| | LYSKLTVDKSRWQQGNVFSCSVMHEALHNHYTQKSLSLSPGK | |
| 266 | EVQLVESGGGLVQPGGSLRLSCAASGFTFSTYAMNWVRQAPGK | CD3vF |
| | GLEWVGRIRSKVNNYATYYADSVKGRFTISRDDSKNTLYLQMNSL | scfv-fc |
| | RAEDTAVYYCVRHGNFGDSYVSWFAYWGQGTLVTVSSGKPGSG | |
| | KPGSGKPGSGKPGSQAVVTQEPSLTVSPGGTVTLTCGSSTGAVT | |
| | TSNYANWVQQKPGKSPRGLIGGTNKRAPGVPARFSGSLLGGKAA | |
| | LTISGAQPEDEADYYCALWYSNHWVFGGGTKLTVLEPKSSDKTHT | |
| | CPPCPAPEFEGGPSVFLFPPKPKDTLMISRTPEVTCVVVDVSHED | |
| | PEVKFNWYVDGVEVHNAKTKPREEQYNSTYRVVSVLTVLHQDWL | |
| | NGKEYKCKVSNKALPASIEKTISKAKGQPREPQVYTLPPCRKKLTK | |
| | NQVSLTCLVKGFYPSDIAVEWESNGQPENNYKTTPPVLKSDGSFF | |
| | LYSKLTVDKSRWQQGNVFSCSVMHEALHNHYTQKSLSLSPGK | |
| 267 | EVQLVESGGGLVQPGGSLRLSCAASGFTFSTYAMNWVRQAPGK | CD3vG |
| | GLEWVGRIRSKSNNYATYYADSVKGRFTISRDDSKNTLYLQMNSL | scfv-Fc |
| | RAEDTAVYYCVRHGNFGDSYVSWFAYWGQGTLVTVSSGKPGSG | |
| | KPGSGKPGSGKPGSQAVVTQEPSLTVSPGGTVTLTCGSSTGAVT | |
| | TSNYANWVQQKPGKSPRGLIGGTNKRAPGVPARFSGSLLGGKAA | |
| | LTISGAQPEDEADYYCALWYSNHWVFGGGTKLTVLEPKSSDKTHT | |
| | CPPCPAPEFEGGPSVFLFPPKPKDTLMISRTPEVTCVVVDVSHED | |
| | PEVKFNWYVDGVEVHNAKTKPREEQYNSTYRVVSVLTVLHQDWL | |
| | NGKEYKCKVSNKALPASIEKTISKAKGQPREPQVYTLPPCRKKLTK | |
| | NQVSLTCLVKGFYPSDIAVEWESNGQPENNYKTTPPVLKSDGSFF | |
| | LYSKLTVDKSRWQQGNVFSCSVMHEALHNHYTQKSLSLSPGK | |
| 268 | EVQLVESGGGLVQPGGSLRLSCAASGFTFSTYAMDWVRQAPGK | CD3vH |
| | GLEWVGRIRSKYNNYATYYADSVKGRFTISRDDSKNTLYLQMNSL | scfv-Fc |
| | RAEDTAVYYCVRHGNFGDSYVSWFAYWGQGTLVTVSSGKPGSG | |
| | KPGSGKPGSGKPGSQAVVTQEPSLTVSPGGTVTLTCGSSTGAVT | |
| | TSNYANWVQQKPGKSPRGLIGGTNKRAPGVPARFSGSLLGGKAA | |
| | LTISGAQPEDEADYYCALWYSNHWVFGGGTKLTVLEPKSSDKTHT | |
| | CPPCPAPEFEGGPSVFLFPPKPKDTLMISRTPEVTCVVVDVSHED | |
| | PEVKFNWYVDGVEVHNAKTKPREEQYNSTYRVVSVLTVLHQDWL | |
| | NGKEYKCKVSNKALPASIEKTISKAKGQPREPQVYTLPPCRKKLTK | |
| | NQVSLTCLVKGFYPSDIAVEWESNGQPENNYKTTPPVLKSDGSFF | |
| | LYSKLTVDKSRWQQGNVFSCSVMHEALHNHYTQKSLSLSPGK | |
| 269 | EVQLVESGGGLVQPGGSLRLSCAASGFTFSTYAMNWVRQAPGK | CD3vI |
| | GLEWVGRIRSKYNNYATYYADSVKGRFTISRDDSKNTLYLQMNSL | scfv-Fc |
| | RAEDTAVYYCVRHGNFGDSYVSWFEYWGQGTLVTVSSGKPGSG | |
| | KPGSGKPGSGKPGSQAVVTQEPSLTVSPGGTVTLTCGSSTGAVT | |
| | TSNYANWVQQKPGKSPRGLIGGTNKRAPGVPARFSGSLLGGKAA | |
| | LTISGAQPEDEADYYCALWYSNHWVFGGGTKLTVLEPKSSDKTHT | |
| | CPPCPAPEFEGGPSVFLFPPKPKDTLMISRTPEVTCVVVDVSHED | |
| | PEVKFNWYVDGVEVHNAKTKPREEQYNSTYRVVSVLTVLHQDWL | |
| | NGKEYKCKVSNKALPASIEKTISKAKGQPREPQVYTLPPCRKKLTK | |
| | NQVSLTCLVKGFYPSDIAVEWESNGQPENNYKTTPPVLKSDGSFF | |
| | LYSKLTVDKSRWQQGNVFSCSVMHEALHNHYTQKSLSLSPGK | |
| 270 | EVQLVESGGGLVQPGGSLRLSCAASGFTFSTYAMNWVRQAPGK | CD3vJ |
| | GLEWVGRIRSKYNNYATYYADSVKGRFTISRDDSKNTLYLQMNSL | scfv-Fc |
| | RAEDTAVYYCVRHGNFGDSYVSWFDYWGQGTLVTVSSGKPGSG | |
| | KPGSGKPGSGKPGSQAVVTQEPSLTVSPGGTVTLTCGSSTGAVT | |
| | TSNYANWVQQKPGKSPRGLIGGTNKRAPGVPARFSGSLLGGKAA | |
| | LTISGAQPEDEADYYCALWYSNHWVFGGGTKLTVLEPKSSDKTHT | |
| | CPPCPAPEFEGGPSVFLFPPKPKDTLMISRTPEVTCVVVDVSHED | |
| | PEVKFNWYVDGVEVHNAKTKPREEQYNSTYRVVSVLTVLHQDWL | |
| | NGKEYKCKVSNKALPASIEKTISKAKGQPREPQVYTLPPCRKKLTK | |
| | NQVSLTCLVKGFYPSDIAVEWESNGQPENNYKTTPPVLKSDGSFF | |
| | LYSKLTVDKSRWQQGNVFSCSVMHEALHNHYTQKSLSLSPGK | |
| 271 | EVQLVESGGGLVQPGGSLRLSCAASGFTFSTYAMNWVRQAPGK | CD3vK |
| | GLEWVGRIRSKYNNYATYYADSVKGRFTISRDDSKNTLYLQMNSL | scfv-Fc |
| | RAEDTAVYYCVRHGNFGDSYVSWFNYWGQGTLVTVSSGKPGSG | |
| | KPGSGKPGSGKPGSQAVVTQEPSLTVSPGGTVTLTCGSSTGAVT | |
| | TSNYANWVQQKPGKSPRGLIGGTNKRAPGVPARFSGSLLGGKAA | |
| | LTISGAQPEDEADYYCALWYSNHWVFGGGTKLTVLEPKSSDKTHT | |
| | CPPCPAPEFEGGPSVFLFPPKPKDTLMISRTPEVTCVVVDVSHED | |
| | PEVKFNWYVDGVEVHNAKTKPREEQYNSTYRVVSVLTVLHQDWL | |
| | NGKEYKCKVSNKALPASIEKTISKAKGQPREPQVYTLPPCRKKLTK | |
| | NQVSLTCLVKGFYPSDIAVEWESNGQPENNYKTTPPVLKSDGSFF | |
| | LYSKLTVDKSRWQQGNVFSCSVMHEALHNHYTQKSLSLSPGK | |
| 272 | EVQLVESGGGLVQPGGSLRLSCAASGFTFSTYAMNWVRQAPGK | CD3vL |
| | GLEWVGRIRSKYNNYATYYADSVKGRFTISRDDSKNTLYLQMNSL | scfv-Fc |
| | RAEDTAVYYCVRHGNFGDSYVSYFAYWGQGTLVTVSSGKPGSGK | |
| | PGSGKPGSGKPGSQAVVTQEPSLTVSPGGTVTLTCGSSTGAVTT | |
| | SNYANWVQQKPGKSPRGLIGGTNKRAPGVPARFSGSLLGGKAAL | |
| | TISGAQPEDEADYYCALWYSNHWVFGGGTKLTVLEPKSSDKTHTC | |
| | PPCPAPEFEGGPSVFLFPPKPKDTLMISRTPEVTCVVVDVSHEDPE | |
| | VKFNWYVDGVEVHNAKTKPREEQYNSTYRVVSVLTVLHQDWLNG | |
| | KEYKCKVSNKALPASIEKTISKAKGQPREPQVYTLPPCRKKLTKNQ | |
| | VSLTCLVKGFYPSDIAVEWESNGQPENNYKTTPPVLKSDGSFFLY | |
| | SKLTVDKSRWQQGNVFSCSVMHEALHNHYTQKSLSLSPGK | |
| 273 | QLVESGGGLVQPGGSLRLSCAASGFTFSTYAMNWVRQAPGKGLE | CD3vB2 |
| | WVGRIRSKANNYATYYADSVKGRFTISRDDSKNTLYLQMNSLRAE | |
| | DTAVYYCVRHGNFGDSYVSWFAYWGQGTLVTVSSGKPGSGKPG | |
| | SGKPGSGKPGSQAVVTQEPSLTVSPGGTVTLTCGSSTGAVTTSN | |
| | YANWVQQKPGKSPRGLIGGTNKRAPGVPARFSGSLLGGKAALTIS | |
| | GAQPEDEADYYCALWYSNHWVFGGGTKLTVLEPKSSDKTHTCPP | |
| | CPAPEFEGGPSVFLFPPKPKDTLMISRTPEVTCVVVDVSHEDPEVK | |
| | FNWYVDGVEVHNAKTKPREEQYNSTYRVVSVLTVLHQDWLNGKE | |
| | YKCKVSNKALPASIEKTISKAKGQPREPQVYTLPPCRKKLTKNQVS | |
| | LTCLVKGFYPSDIAVEWESNGQPENNYKTTPPVLKSDGSFFLYSKL | |
| | TVDKSRWQQGNVFSCSVMHEALHNHYTQKSLSLSPGK | |
| 274 | EVQLLESGGGLVQPGGSLRLSCAASGFTFSSYGMHWVRQAPGK | HC; |
| | GLEWVAVISGSGSSKYYADSVKGRFTISRDNSKNTLYLQMNSLRA | DLL3 |
| | EDTAVYYCARDWFFYLFDYWGQGTLVTVSSASTKGPSVFPLAPSS | |
| | KSTSGGTAALGCLVKDYFPEPVTVSWNSGALTSGVHTFPAVLQSS | |
| | GLYSLSSVVTVPSSSLGTQTYICNVNHKPSNTKVDKRVEPKSCDKT | |
| | HTCPPCPAPEFEGGPSVFLFPPKPKDTLMISRTPEVTCVVVDVSHE | |
| | DPEVKFNWYVDGVEVHNAKTKPREEQYNSTYRVVSVLTVLHQDW | |
| | LNGKEYKCKVSNKALPASIEKTISKAKGQPREPQVCTLPPSRDELT | |
| | KNQVSLTCLVEGFYPSDIAVEWESNGQPENNYKTTPPVLDSDGSF | |
| | FLYSDLTVDKSRWQQGNVFSCSVMHEALHNHYTQESLSLSPGK | |
| 275 | EVQLLESGGGLVQPGGSLRLSCAASGFTFSSYGMHWVRQAPGK | HC; |
| | GLEWVAVISGSGSSKYYADSVKGRFTISRDNSKNTLYLQMNSLRA | DLL3.11, |
| | EDTAVYYCARDWFYFIFDYWGQGTLVTVSSASTKGPSVFPLAPSS | DLL3.15 |
| | KSTSGGTAALGCLVKDYFPEPVTVSWNSGALTSGVHTFPAVLQSS | |
| | GLYSLSSVVTVPSSSLGTQTYICNVNHKPSNTKVDKRVEPKSCDKT | |
| | HTCPPCPAPEFEGGPSVFLFPPKPKDTLMISRTPEVTCVVVDVSHE | |
| | DPEVKFNWYVDGVEVHNAKTKPREEQYNSTYRVVSVLTVLHQDW | |
| | LNGKEYKCKVSNKALPASIEKTISKAKGQPREPQVCTLPPSRDELT | |
| | KNQVSLTCLVEGFYPSDIAVEWESNGQPENNYKTTPPVLDSDGSF | |
| | FLYSDLTVDKSRWQQGNVFSCSVMHEALHNHYTQESLSLSPGK | |
| 276 | EVQLLESGGGLVQPGGSLRLSCAASGFTFSSYGMHWVRQAPGK | HC: |
| | GLEWVAVISHHGSSKYYADSVKGRFTISRDNSKNTLYLQMNSLRA | DLL3.18, |
| | EDTAVYYCARDWFFYLFDYWGQGTLVTVSSASTKGPSVFPLAPSS | DLL3.22 |
| | KSTSGGTAALGCLVKDYFPEPVTVSWNSGALTSGVHTFPAVLQSS | |
| | GLYSLSSVVTVPSSSLGTQTYICNVNHKPSNTKVDKRVEPKSCDKT | |
| | HTCPPCPAPEFEGGPSVFLFPPKPKDTLMISRTPEVTCVVVDVSHE | |
| | DPEVKFNWYVDGVEVHNAKTKPREEQYNSTYRVVSVLTVLHQDW | |
| | LNGKEYKCKVSNKALPASIEKTISKAKGQPREPQVCTLPPSRDELT | |
| | KNQVSLTCLVEGFYPSDIAVEWESNGQPENNYKTTPPVLDSDGSF | |
| | FLYSDLTVDKSRWQQGNVFSCSVMHEALHNHYTQESLSLSPGK | |
| 277 | EVQLLESGGGLVQPGGSLRLSCAASGFTFSSYGMHWVRQAPGK | HC; |
| | GLEWVAVISHHGSSKYYADSVKGRFTISRDNSKNTLYLQMNSLRA | DLL3.5, |
| | EDTAVYYCARDWFYFIFDYWGQGTLVTVSSASTKGPSVFPLAPSS | DLL3.12, |
| | KSTSGGTAALGCLVKDYFPEPVTVSWNSGALTSGVHTFPAVLQSS | DLL3.26 |
| | GLYSLSSVVTVPSSSLGTQTYICNVNHKPSNTKVDKRVEPKSCDKT | |
| | HTCPPCPAPEFEGGPSVFLFPPKPKDTLMISRTPEVTCVVVDVSHE | |
| | DPEVKFNWYVDGVEVHNAKTKPREEQYNSTYRVVSVLTVLHQDW | |
| | LNGKEYKCKVSNKALPASIEKTISKAKGQPREPQVCTLPPSRDELT | |
| | KNQVSLTCLVEGFYPSDIAVEWESNGQPENNYKTTPPVLDSDGSF | |
| | FLYSDLTVDKSRWQQGNVFSCSVMHEALHNHYTQESLSLSPGK | |
| 278 | EVQLLESGGGLVQPGGSLRLSCAASGFTFSSYGMHWVRQAPGK | HC; |
| | GLEWVAVISYDGSSKYYADSVKGRFTISRDNSKNTLYLQMNSLRA | DLL3.19, |
| | EDTAVYYCARDWFFYLFDYWGQGTLVTVSSASTKGPSVFPLAPSS | DLL3.23 |
| | KSTSGGTAALGCLVKDYFPEPVTVSWNSGALTSGVHTFPAVLQSS | |
| | GLYSLSSVVTVPSSSLGTQTYICNVNHKPSNTKVDKRVEPKSCDKT | |
| | HTCPPCPAPEFEGGPSVFLFPPKPKDTLMISRTPEVTCVVVDVSHE | |
| | DPEVKFNWYVDGVEVHNAKTKPREEQYNSTYRVVSVLTVLHQDW | |
| | LNGKEYKCKVSNKALPASIEKTISKAKGQPREPQVCTLPPSRDELT | |
| | KNQVSLTCLVEGFYPSDIAVEWESNGQPENNYKTTPPVLDSDGSF | |
| | FLYSDLTVDKSRWQQGNVFSCSVMHEALHNHYTQESLSLSPGK | |
| 279 | EVQLLESGGGLVQPGGSLRLSCAASGFTFSSYGMHWVRQAPGK | HC; |
| | GLEWVAVISYDGSSKYYADSVKGRFTISRDNSKNTLYLQMNSLRA | DLL3.13, |
| | EDTAVYYCARDWFYFIFDYWGQGTLVTVSSASTKGPSVFPLAPSS | DLL3.16, |
| | KSTSGGTAALGCLVKDYFPEPVTVSWNSGALTSGVHTFPAVLQSS | |
| | GLYSLSSVVTVPSSSLGTQTYICNVNHKPSNTKVDKRVEPKSCDKT | |
| | HTCPPCPAPEFEGGPSVFLFPPKPKDTLMISRTPEVTCVVVDVSHE | |
| | DPEVKFNWYVDGVEVHNAKTKPREEQYNSTYRVVSVLTVLHQDW | |
| | LNGKEYKCKVSNKALPASIEKTISKAKGQPREPQVCTLPPSRDELT | |
| | KNQVSLTCLVEGFYPSDIAVEWESNGQPENNYKTTPPVLDSDGSF | |
| | FLYSDLTVDKSRWQQGNVFSCSVMHEALHNHYTQESLSLSPGK | |
| 280 | EVQLLESGGGLVQPGGSLRLSCAASGFTFSSYGMHWVRQAPGK | HC; |
| | GLEWVSVISHHGSSKYYADSVKGRFTISRDNSKNTLYLQMNSLRA | DLL3.20, |
| | EDTAVYYCAKDWFFYLFDYWGQGTLVTVSSASTKGPSVFPLAPSS | DLL3.24 |
| | KSTSGGTAALGCLVKDYFPEPVTVSWNSGALTSGVHTFPAVLQSS | |
| | GLYSLSSVVTVPSSSLGTQTYICNVNHKPSNTKVDKRVEPKSCDKT | |
| | HTCPPCPAPEFEGGPSVFLFPPKPKDTLMISRTPEVTCVVVDVSHE | |
| | DPEVKFNWYVDGVEVHNAKTKPREEQYNSTYRVVSVLTVLHQDW | |
| | LNGKEYKCKVSNKALPASIEKTISKAKGQPREPQVCTLPPSRDELT | |
| | KNQVSLTCLVEGFYPSDIAVEWESNGQPENNYKTTPPVLDSDGSF | |
| | FLYSDLTVDKSRWQQGNVFSCSVMHEALHNHYTQESLSLSPGK | |
| 281 | EVQLLESGGGLVQPGGSLRLSCAASGFTFSSYGMHWVRQAPGK | HC; |
| | GLEWVSVISHHGSSKYYADSVKGRFTISRDNSKNTLYLQMNSLRA | DLL3.14, |
| | EDTAVYYCAKDWFYFIFDYWGQGTLVTVSSASTKGPSVFPLAPSS | DLL3.17 |
| | KSTSGGTAALGCLVKDYFPEPVTVSWNSGALTSGVHTFPAVLQSS | |
| | GLYSLSSVVTVPSSSLGTQTYICNVNHKPSNTKVDKRVEPKSCDKT | |
| | HTCPPCPAPEFEGGPSVFLFPPKPKDTLMISRTPEVTCVVVDVSHE | |
| | DPEVKFNWYVDGVEVHNAKTKPREEQYNSTYRVVSVLTVLHQDW | |
| | LNGKEYKCKVSNKALPASIEKTISKAKGQPREPQVCTLPPSRDELT | |
| | KNQVSLTCLVEGFYPSDIAVEWESNGQPENNYKTTPPVLDSDGSF | |
| | FLYSDLTVDKSRWQQGNVFSCSVMHEALHNHYTQESLSLSPGK | |
| 282 | EVQLQQSGPVLVKPGASVKMSCKASGFTFTDYYMNWVKQSHGK | HC; |
| | SLEWIGVINPDNGITTYNQKFKGKATLTVDKSSSTAYMELNGLTSE | DLL3.21, |
| | DSAVYYCARGVWNYERSFDYWGQGTTLTVSSASTKGPSVFPLAP | DLL3.25 |
| | SSKSTSGGTAALGCLVKDYFPEPVTVSWNSGALTSGVHTFPAVLQ | |
| | SSGLYSLSSVVTVPSSSLGTQTYICNVNHKPSNTKVDKRVEPKSC | |
| | DKTHTCPPCPAPEFEGGPSVFLFPPKPKDTLMISRTPEVTCVVVDV | |
| | SHEDPEVKFNWYVDGVEVHNAKTKPREEQYNSTYRVVSVLTVLH | |
| | QDWLNGKEYKCKVSNKALPASIEKTISKAKGQPREPQVCTLPPSR | |
| | DELTKNQVSLTCLVEGFYPSDIAVEWESNGQPENNYKTTPPVLDS | |
| | DGSFFLYSDLTVDKSRWQQGNVFSCSVMHEALHNHYTQESLSLS | |
| | PGK | |
| 283 | EVQLVESGGGLVQPGGSLRLSCAASGFTFSNYGMHWVRQAPGK | HC; |
| | GLEWVAVISHHGSSKYYADSVKGRYTISRDNSKNTLYLQMNSLRA | DLL3.9 |
| | EDTAVYYCARDWFFYLFDYWGQGTLVTVSSASTKGPSVFPLAPSS | |
| | KSTSGGTAALGCLVKDYFPEPVTVSWNSGALTSGVHTFPAVLQSS | |
| | GLYSLSSVVTVPSSSLGTQTYICNVNHKPSNTKVDKRVEPKSCDKT | |
| | HTCPPCPAPEFEGGPSVFLFPPKPKDTLMISRTPEVTCVVVDVSHE | |
| | DPEVKFNWYVDGVEVHNAKTKPREEQYNSTYRVVSVLTVLHQDW | |
| | LNGKEYKCKVSNKALPASIEKTISKAKGQPREPQVCTLPPSRDELT | |
| | KNQVSLTCLVEGFYPSDIAVEWESNGQPENNYKTTPPVLDSDGSF | |
| | FLYSDLTVDKSRWQQGNVFSCSVMHEALHNHYTQESLSLSPGK | |
| 284 | QVQLQESGPGLVKPSETLSLTCTVSGGSISSYYWSWIRQPPGKGL | HC; |
| | EWIGYVYYSGTTNYNPSLKSRVTISVDTSKNQFSLKLSSVTAADTA | DLL3.27 |
| | VYYCASIAVTGFYFDYWGQGTLVTVSSASTKGPSVFPLAPSSKST | |
| | SGGTAALGCLVKDYFPEPVTVSWNSGALTSGVHTFPAVLQSSGLY | |
| | SLSSVVTVPSSSLGTQTYICNVNHKPSNTKVDKRVEPKSCDKTHT | |
| | CPPCPAPEFEGGPSVFLFPPKPKDTLMISRTPEVTCVVVDVSHED | |
| | PEVKFNWYVDGVEVHNAKTKPREEQYNSTYRVVSVLTVLHQDWL | |
| | NGKEYKCKVSNKALPASIEKTISKAKGQPREPQVCTLPPSRDELTK | |
| | NQVSLTCLVEGFYPSDIAVEWESNGQPENNYKTTPPVLDSDGSFF | |
| | LYSDLTVDKSRWQQGNVFSCSVMHEALHNHYTQESLSLSPGK | |
| 285 | QVQLQQSGPVLVKPGASVKMSCKASGYSFTDYYVNWVKQSHGK | HC; |
| | SLEWIGIISPNDGGTNYNQKFKGKATLTVDKSSSTAYMEVNSLTSE | DLL3.28 |
| | DSAVYYCARDDDLGWYFDVWGTGTTVTVSSASTKGPSVFPLAPS | |
| | SKSTSGGTAALGCLVKDYFPEPVTVSWNSGALTSGVHTFPAVLQS | |
| | SGLYSLSSVVTVPSSSLGTQTYICNVNHKPSNTKVDKRVEPKSCD | |
| | KTHTCPPCPAPEFEGGPSVFLFPPKPKDTLMISRTPEVTCVVVDVS | |
| | HEDPEVKFNWYVDGVEVHNAKTKPREEQYNSTYRVVSVLTVLHQ | |
| | DWLNGKEYKCKVSNKALPASIEKTISKAKGQPREPQVCTLPPSRD | |
| | ELTKNQVSLTCLVEGFYPSDIAVEWESNGQPENNYKTTPPVLDSD | |
| | GSFFLYSDLTVDKSRWQQGNVFSCSVMHEALHNHYTQESLSLSP | |
| | GK | |
| 286 | QVQLVESGGGAVQPGRSLRLSCAASGFTFSNYGMHWVRQAPGK | HC; |
| | GLEWVAVISHHGSSKYYARSVKGRFTISRDNSKNTLYLEMNSLRA | DLL3.8 |
| | EDTAVYYCARDVWVELVFDYWGQGTLVTVSSASTKGPSVFPLAPS | |
| | SKSTSGGTAALGCLVKDYFPEPVTVSWNSGALTSGVHTFPAVLQS | |
| | SGLYSLSSVVTVPSSSLGTQTYICNVNHKPSNTKVDKRVEPKSCD | |
| | KTHTCPPCPAPEFEGGPSVFLFPPKPKDTLMISRTPEVTCVVVDVS | |
| | HEDPEVKFNWYVDGVEVHNAKTKPREEQYNSTYRVVSVLTVLHQ | |
| | DWLNGKEYKCKVSNKALPASIEKTISKAKGQPREPQVCTLPPSRD | |
| | ELTKNQVSLTCLVEGFYPSDIAVEWESNGQPENNYKTTPPVLDSD | |
| | GSFFLYSDLTVDKSRWQQGNVFSCSVMHEALHNHYTQESLSLSP | |
| | GK | |
| 287 | QVQLVESGGGAVQPGRSLRLSCAASGFTFSNYGMHWVRQAPGK | HC; |
| | GLEWVAVISHHGSSKYYARSVKGRFTISRDNSKNTLYLEMNSLRA | DLL3.29, |
| | EDTAVYYCARDVWVELVFDYWGQGTLVTVSSASTKGPSVFPLAPS | DLL3.30, |
| | SKSTSGGTAALGCLVKDYFPEPVTVSWNSGALTSGVHTFPAVLQS | DLL3.36 |
| | SGLYSLSSVVTVPSSSLGTQTYICNVNHKPSNTKVDKRVEPKSCD | |
| | KTHTCPPCPAPEFEGGPSVFLFPPKPKDTLMISRTPEVTCVVVDVS | |
| | HEDPEVKFNWYVDGVEVHNAKTKPREEQYNSTYRVVSVLTVLHQ | |
| | DWLNGKEYKCKVSNKALPASIEKTISKAKGQPREPQVCTLPPSRD | |
| | ELTKNQVSLTCLVEGFYPSDIAVEWESNGQPENNYKTTPPVLDSD | |
| | GSFFLYSDLTVDKSRWQQGNVFSCSVMHEALHNHYTQESLSLSP | |
| | GK | |
| 288 | QVQLVESGGGWQPGRSLRLSCAASGFTFSNYGMHWVRQAPGK | HC |
| | GLEWVAVISHHGSSKYYADSVKGRFTISRDNSKNTLYLQMNSLRA | DLL3.10, |
| | EDTAVYYCARDWFFYLFDYWGQGTLVTVSSASTKGPSVFPLAPSS | DLL3.31 |
| | KSTSGGTAALGCLVKDYFPEPVTVSWNSGALTSGVHTFPAVLQSS | |
| | GLYSLSSVVTVPSSSLGTQTYICNVNHKPSNTKVDKRVEPKSCDKT | |
| | HTCPPCPAPEFEGGPSVFLFPPKPKDTLMISRTPEVTCVVVDVSHE | |
| | DPEVKFNWYVDGVEVHNAKTKPREEQYNSTYRVVSVLTVLHQDW | |
| | LNGKEYKCKVSNKALPASIEKTISKAKGQPREPQVCTLPPSRDELT | |
| | KNQVSLTCLVEGFYPSDIAVEWESNGQPENNYKTTPPVLDSDGSF | |
| | FLYSDLTVDKSRWQQGNVFSCSVMHEALHNHYTQESLSLSPGK | |
| 289 | QVQLVESGGGWQPGRSLRLSCAASGFTFSNYGMHWVRQAPGK | HC; |
| | GLEWVAVISHHGSSKYYADSVKGRFTISRDNSKNTLYLQMNSLRA | DLL3.32, |
| | EDTAVYYCARDWFYFIFDYWGQGTLVTVSSASTKGPSVFPLAPSS | DLL3.33 |
| | KSTSGGTAALGCLVKDYFPEPVTVSWNSGALTSGVHTFPAVLQSS | |
| | GLYSLSSVVTVPSSSLGTQTYICNVNHKPSNTKVDKRVEPKSCDKT | |
| | HTCPPCPAPEFEGGPSVFLFPPKPKDTLMISRTPEVTCVVVDVSHE | |
| | DPEVKFNWYVDGVEVHNAKTKPREEQYNSTYRVVSVLTVLHQDW | |
| | LNGKEYKCKVSNKALPASIEKTISKAKGQPREPQVCTLPPSRDELT | |
| | KNQVSLTCLVEGFYPSDIAVEWESNGQPENNYKTTPPVLDSDGSF | |
| | FLYSDLTVDKSRWQQGNVFSCSVMHEALHNHYTQESLSLSPGK | |
| 290 | QVQLVQSGAEVKKPGASVKVSCKASDYTFSNYYIEWVRQAPGQG | HC; |
| | LEWMGEILPGNGNTVYNEKFKDRVTMTVDTSTSTAYMELRSLRSD | DLL3.1 |
| | DTAVYYCARWGDYALFANWGQGTLVTVSSASTKGPSVFPLAPSS | |
| | KSTSGGTAALGCLVKDYFPEPVTVSWNSGALTSGVHTFPAVLQSS | |
| | GLYSLSSVVTVPSSSLGTQTYICNVNHKPSNTKVDKRVEPKSCDKT | |
| | HTCPPCPAPEFEGGPSVFLFPPKPKDTLMISRTPEVTCVVVDVSHE | |
| | DPEVKFNWYVDGVEVHNAKTKPREEQYNSTYRVVSVLTVLHQDW | |
| | LNGKEYKCKVSNKALPASIEKTISKAKGQPREPQVCTLPPSRDELK | |
| | NQVSLTCLVEGFYPSDIAVEWESNGQPENNYKTTPPVLDSDGSFF | |
| | LYSDLTVDKSRWQQGNVFSCSVMHEALHNHYTQESLSLSPGK | |
| 291 | QVQLVQSGAEVKKPGASVKVSCKASGYTFTDYFMNWVRQAPGQ | HC; |
| | GLEWMGVINPYNDITIYNQKFQGRVTMTVDRSTSTVYMELSSLRS | DLL3.3 |
| | EDTAVYYCAREGVLYDGYYEGAYWGQGTLVTVSSASTKGPSVFP | |
| | LAPSSKSTSGGTAALGCLVKDYFPEPVTVSWNSGALTSGVHTFPA | |
| | VLQSSGLYSLSSVVTVPSSSLGTQTYICNVNHKPSNTKVDKRVEPK | |
| | SCDKTHTCPPCPAPEFEGGPSVFLFPPKPKDTLMISRTPEVTCVVV | |
| | DVSHEDPEVKFNWYVDGVEVHNAKTKPREEQYNSTYRVVSVLTV | |
| | LHQDWLNGKEYKCKVSNKALPASIEKTISKAKGQPREPQVCTLPP | |
| | SRDELTKNQVSLTCLVEGFYPSDIAVEWESNGQPENNYKTTPPVL | |
| | DSDGSFFLYSDLTVDKSRWQQGNVFSCSVMHEALHNHYTQESLS | |
| | LSPGK | |
| 292 | QVQLVQSGAEVKKPGASVKVSCKATDYIFSNYYIEWVRQAPGQGL | HC; |
| | EWMGEILPGTGNTVYNEKFKDRVTMTVDTSTSTVYMELSSLRSED | DLL3.2, |
| | TAVYYCARWGDYALFANWGQGTLVTVSSASTKGPSVFPLAPSSK | DLL3.4 |
| | STSGGTAALGCLVKDYFPEPVTVSWNSGALTSGVHTFPAVLQSSG | |
| | LYSLSSVVTVPSSSLGTQTYICNVNHKPSNTKVDKRVEPKSCDKTH | |
| | TCPPCPAPEFEGGPSVFLFPPKPKDTLMISRTPEVTCVVVDVSHED | |
| | PEVKFNWYVDGVEVHNAKTKPREEQYNSTYRVVSVLTVLHQDWL | |
| | NGKEYKCKVSNKALPASIEKTISKAKGQPREPQVCTLPPSRDELTK | |
| | NQVSLTCLVEGFYPSDIAVEWESNGQPENNYKTTPPVLDSDGSFF | |
| | LYSDLTVDKSRWQQGNVFSCSVMHEALHNHYTQESLSLSPGK | |
| 293 | SDVQLQESGPGLVKPSQSLSLTCSVTGYSITSAYYWNWIRQFPGN | HC; |
| | KLEWMGYISDVGHNYYNPSLKNRISITRDTSKNQFFLKLNSVTPED | DLL3.34 |
| | TATYYCARDQVFAYWGQGTLVTVSAASTKGPSVFPLAPSSKSTSG | |
| | GTAALGCLVKDYFPEPVTVSWNSGALTSGVHTFPAVLQSSGLYSL | |
| | SSVVTVPSSSLGTQTYICNVNHKPSNTKVDKRVEPKSCDKTHTCP | |
| | PCPAPEFEGGPSVFLFPPKPKDTLMISRTPEVTCVVVDVSHEDPEV | |
| | KFNWYVDGVEVHNAKTKPREEQYNSTYRVVSVLTVLHQDWLNGK | |
| | EYKCKVSNKALPASIEKTISKAKGQPREPQVCTLPPSRDELTKNQV | |
| | SLTCLVEGFYPSDIAVEWESNGQPENNYKTTPPVLDSDGSFFLYS | |
| | DLTVDKSRWQQGNVFSCSVMHEALHNHYTQESLSLSPGK | |
| 294 | SDVQLQESGPGLVKPSQSLSLTCSVTGYSITSAYYWNWIRQFPGN | HC; |
| | KLEWMGYISDVGSNNYNPSLKNRISITRDTFKNQFFLKLNSVTTED | DLL3.35 |
| | TATYFCTRDQVFAYWGQGTLVTVSAASTKGPSVFPLAPSSKSTSG | |
| | GTAALGCLVKDYFPEPVTVSWNSGALTSGVHTFPAVLQSSGLYSL | |
| | SSVVTVPSSSLGTQTYICNVNHKPSNTKVDKRVEPKSCDKTHTCP | |
| | PCPAPEFEGGPSVFLFPPKPKDTLMISRTPEVTCVVVDVSHEDPEV | |
| | KFNWYVDGVEVHNAKTKPREEQYNSTYRVVSVLTVLHQDWLNGK | |
| | EYKCKVSNKALPASIEKTISKAKGQPREPQVCTLPPSRDELTKNQV | |
| | SLTCLVEGFYPSDIAVEWESNGQPENNYKTTPPVLDSDGSFFLYS | |
| | DLTVDKSRWQQGNVFSCSVMHEALHNHYTQESLSLSPGK | |
| 295 | DIQLTQSPSFLSASVGDRVTITCKASQNVGIAVAWYQQKPGKAPKL | LC; |
| | LIYAASNRYTGVPSRFSGSGSGTEFTLTISSLQPEDFATYYCQQYS | DLL3.3 |
| | TYPYTFGQGTKLEIKRTVAAPSVFIFPPSDEQLKSGTASVVCLLNNF | |
| | YPREAKVQWKVDNALQSGNSQESVTEQDSKDSTYSLSSTLTLSKA | |
| | DYEKHKVYACEVTHQGLSSPVTKSFNRGEC | |
| 296 | DIQMTQSPSFLSASVGDRVTITCKASQNVGTNVAWYQQKPGKAPK | LC; |
| | PLIYSTSYRYSGVPSRFSGSGSGTEFTLTISSLQPEDFATYYCQQY | DLL3.4 |
| | NNYPLTFGGGTKVEIKRTVAAPSVFIFPPSDEQLKSGTASVVCLLN | |
| | NFYPREAKVQWKVDNALQSGNSQESVTEQDSKDSTYSLSSTLTLS | |
| | KADYEKHKVYACEVTHQGLSSPVTKSFNRGEC | |
| 297 | DIQMTQSPSSLSASVGDRVTITCKSSQSLLHSDAKTFLYWYQQKP | LC; |
| | GKAPKLLIYEVSNRFSGVPSRFSGSGSGTDFTLTISSLQPEDFATY | DLL3.26 |
| | YCLQGERLPFTFGQGTKVEIKRTVAAPSVFIFPPSDEQLKSGTASV | |
| | VCLLNNFYPREAKVQWKVDNALQSGNSQESVTEQDSKDSTYSLS | |
| | STLTLSKADYEKHKVYACEVTHQGLSSPVTKSFNRGEC | |
| 298 | DIQMTQSPSTLSASVGDRVTITCKASQNVGTNVAWYQQKPGKAPK | LC; |
| | ALIYSASYRYSGVPSRFSGSGSGTEFTLTISSLQPDDFATYYCQQY | DLL3.27 |
| | NSYPFTFGQGTKLEIKRTVAAPSVFIFPPSDEQLKSGTASVVCLLN | |
| | NFYPREAKVQWKVDNALQSGNSQESVTEQDSKDSTYSLSSTLTLS | |
| | KADYEKHKVYACEVTHQGLSSPVTKSFNRGEC | |
| 299 | DIVMTQAAFSNPVTVGTSASISCRSSKSLLHSNGITYLYWYLQKPG | LC; |
| | QSPQLLIYQMSNLASGVPDRFSSSGSGTDFTLRISRVEAEDVGVY | DLL3.1 |
| | YCAQNLELPVVTFGGGTKLEIKRTVAAPSVFIFPPSDEQLKSGTASV | |
| | VCLLNNFYPREAKVQWKVDNALQSGNSQESVTEQDSKDSTYSLS | |
| | STLTLSKADYEKHKVYACEVTHQGLSSPVTKSFNRGEC | |
| 300 | DIVMTQSPKFMSTSVGDRVSVTCKASQNVGTNVAWYQQKPGQSP | LC; |
| | KALIYSASYRYSGVPDRFTGSGSGTDFTLTFSSVQSEDLAEYFCQ | DLL3.2 |
| | QYNNYPLTFGGGTKLEIKRRTVAAPSVFIFPPSDEQLKSGTASVVC | |
| | LLNNFYPREAKVQWKVDNALQSGNSQESVTEQDSKDSTYSLSSTL | |
| | TLSKADYEKHKVYACEVTHQGLSSPVTKSFNRGEC | |
| 301 | DIVMTQSPLSLPVTPGEPASISCKSSQSLLHSDAKTFLYWYLQKPG | LC; |
| | QSPQLLIYEVSNRFSGVPDRFSGSGSGTDFTLKISRVEAEDVGVYY | DLL3.8 |
| | CLQGRELPFTFGQGTKVEIKRTVAAPSVFIFPPSDEQLKSGTASVV | |
| | CLLNNFYPREAKVQWKVDNALQSGNSQESVTEQDSKDSTYSLSS | |
| | TLTLSKADYEKHKVYACEVTHQGLSSPVTKSFNRGEC | |
| 302 | DIVMTQSPLSLPVTPGEPASISCKSSQSLLHSDGKTFLYWYLQKPG | LC; |
| | QSPQLLIYEVSNRFSGVPDRFSGSGSGTDFTLKISRVEAEDVGVYY | DLL3.9 |
| | CLQGERLPFTFGQGTKVEIKRTVAAPSVFIFPPSDEQLKSGTASVV | |
| | CLLNNFYPREAKVQWKVDNALQSGNSQESVTEQDSKDSTYSLSS | |
| | TLTLSKADYEKHKVYACEVTHQGLSSPVTKSFNRGEC | |
| 303 | DIVMTQSPLSLPVTPGEPASISCRSSQSLLHSDAKTFLDWYLQKPG | LC; |
| | QSPQLLIYEVSNRASGVPDRFSGSGSGTDFTLKISRVEAEDVGVYY | DLL3.22, |
| | CLQGRELPFTFGQGTKVEIKRTVAAPSVFIFPPSDEQLKSGTASVV | DLL3.23, |
| | CLLNNFYPREAKVQWKVDNALQSGNSQESVTEQDSKDSTYSLSS | DLL3.24, |
| | TLTLSKADYEKHKVYACEVTHQGLSSPVTKSFNRGEC | DLL3.25 |
| 304 | DIVMTQSPLSLPVTPGEPASISCRSSQSLLHSDGKTFLDWYLQKPG | LC; |
| | QSPQLLIYEVSNRASGVPDRFSGSGSGTDFTLKISRVEAEDVGVYY | DLL3.5, |
| | CLQGERLPFTFGQGTKVEIKRTVAAPSVFIFPPSDEQLKSGTASVV | DLL3.15, |
| | CLLNNFYPREAKVQWKVDNALQSGNSQESVTEQDSKDSTYSLSS | DLL3.16, |
| | TLTLSKADYEKHKVYACEVTHQGLSSPVTKSFNRGEC | DLL3.17 |
| 305 | DIVMTQTPLSLSVTPGQPASISCKSSQSLLHSDAKTFLYWYLQKPG | LC |
| | QPPQLLIYEVSNRFSGVPDRFSGSGSGTDFTLKISRVEAEDVGVYY | DLL3.18, |
| | CLQGRELPFTFGPGTKVEIKRTVAAPSVFIFPPSDEQLKSGTASVV | DLL3.19, |
| | CLLNNFYPREAKVQWKVDNALQSGNSQESVTEQDSKDSTYSLSS | DLL3.20, |
| | TLTLSKADYEKHKVYACEVTHQGLSSPVTKSFNRGEC | DLL3.21 |
| 306 | DIVMTQTPLSLSVTPGQPASISCKSSQSLLHSDAKTFLYWYLQKPG | LC; |
| | QPPQLLIYEVSNRFSGVPDRFSGSGSGTDFTLKISRVEAEDVGVYY | DLL3.11, |
| | CLQGRELPFTFGPGTKVEIKSTFGQGTKVEIKRTVAAPSVFIFPPSD | DLL3.12, |
| | EQLKSGTASVVCLLNNFYPREAKVQWKVDNALQSGNSQESVTEQ | DLL3.13, |
| | DSKDSTYSLSSTLTLSKADYEKHKVYACEVTHQGLSSPVTKSFNR | DLL3.14 |
| | GEC | |
| 307 | DIVMTQTPLSLSVTPGQPASISCKSSQSLLHSDGKTFLYWYLQKPG | LC |
| | QPPQLLIYEVSNRFSGVPDRFSGSGSGTDFTLKISRVEAEDVGVYY | DLL3.32, |
| | CLQGERLPFTFGPGTKVEIKRTVAAPSVFIFPPSDEQLKSGTASVV | DLL3.33 |
| | CLLNNFYPREAKVQWKVDNALQSGNSQESVTEQDSKDSTYSLSS | |
| | TLTLSKADYEKHKVYACEVTHQGLSSPVTKSFNRGEC | |
| 308 | DIVMTQTPLSLSVTPGQPASISCKSSQSLLHSDGKTFLYWYLQKPG | LC; |
| | QPPQLLIYEVSNRFSGVPDRFSGSGSGTDFTLKISRVEAEDVGVYY | DLL3.10, |
| | CLQGERLPFTFGPGTKVEIKSTFGQGTKVEIKRTVAAPSVFIFPPSD | DLL3.31 |
| | EQLKSGTASVVCLLNNFYPREAKVQWKVDNALQSGNSQESVTEQ | |
| | DSKDSTYSLSSTLTLSKADYEKHKVYACEVTHQGLSSPVTKSFNR | |
| | GEC | |
| 309 | DIVMTQTPLSLSVTPGQPASISCKSSQSLLHSDGKTFLYWYLQKPG | LC; |
| | QPPQLLIYEVSNRFSGVPDRFSGSGSGTDFTLKISRVEAEDVGVYY | DLL3.29, |
| | CLQGIHLPFTFGPGTKVEIKRTVAAPSVFIFPPSDEQLKSGTASVVC | DLL3.30, |
| | LLNNFYPREAKVQWKVDNALQSGNSQESVTEQDSKDSTYSLSSTL | DLL3.36 |
| | TLSKADYEKHKVYACEVTHQGLSSPVTKSFNRGEC | |
| 310 | DIVMTQTPLSLSVTPGQPASISCKSSQSLLHSDGKTFLYWYLQKPG | LC; |
| | QPPQLLIYEVSNRFSGVPDRFSGSGSGTDFTLKISRVEAEDVGVYY | DLL3.29.1 |
| | CLQGIHLPFTFGPGTKVEIKSTFGQGTKVEIKRTVAAPSVFIFPPSD | |
| | EQLKSGTASVVCLLNNFYPREAKVQWKVDNALQSGNSQESVTEQ | |
| | DSKDSTYSLSSTLTLSKADYEKHKVYACEVTHQGLSSPVTKSFNR | |
| | GEC | |
| 311 | DTVLTQSPASLAVSLGQRATISCRASESVHSYGNSLIHWYQQKPG | LC; |
| | QPPRLLIYRASNLESGIPARFSGSGSRTDFTLTINPVEADDVATYYC | DLL3.34 |
| | QQTNEDPLTFGAGTKLELKRTVAAPSVFIFPPSDEQLKSGTASVVC | |
| | LLNNFYPREAKVQWKVDNALQSGNSQESVTEQDSKDSTYSLSSTL | |
| | TLSKADYEKHKVYACEVTHQGLSSPVTKSFNRGEC | |
| 312 | EIVLTQSPGTLSLSPGERVTLSCRASQRVNNNYLAWYQQRPGQAP | LC; |
| | RLLIYGASSRATGIPDRFSGSGSGTDFTLTISRLEPEDFAVYYCQQ | DLL3.28 |
| | YDRSPLTFGGGTKLEIKRTVAAPSVFIFPPSDEQLKSGTASVVCLLN | |
| | NFYPREAKVQWKVDNALQSGNSQESVTEQDSKDSTYSLSSTLTLS | |
| | KADYEKHKVYACEVTHQGLSSPVTKSFNRGEC | |
| 313 | QIVLTQSPAIMSASPGEKVTMTCSASSSVSYMHWYQQKSGTSPKR | LC; |
| | WIYDTSKLASGVPARFSGSGSGTSYSLTISSMEAEDAATYYCQQW | DLL3.35 |
| | SSNPLTFGAGTKLELKRTVAAPSVFIFPPSDEQLKSGTASVVCLLN | |
| | NFYPREAKVQWKVDNALQSGNSQESVTEQDSKDSTYSLSSTLTLS | |
| | KADYEKHKVYACEVTHQGLSSPVTKSFNRGEC | |
| 341 | QVQLVQSGAEVKKPGASVKVSCKASDYTFSNYYIEWVRQAPGQG | DLL3Scfv- |
| | LEWMGEILPGNGNTVYNEKFKDRVTMTVDTSTSTAYMELRSLRSD | CD3Scfv-Fv |
| | DTAVYYCARWGDYALFANWGQGTLVTVSSGGGGSGGGGSGGG | |
| | GSDIQMTQSPSTLSASVGDRVTITCKASQNVGTNVAWYQQKPGK | |
| | APKALIYSASYRYSGVPSRFSGSGSGTEFTLTISSLQPDDFATYYC | |
| | QQYNSYPFTFGQGTKLEIKSGGGSEVQLVESGGGLVQPGGSLRL | |
| | SCAASGFTFSTYAMNWVRQAPGKGLEWVGRIRSKYNNYATYYAD | |
| | SVKGRFTISRDDSKNTLYLQMNSLRAEDTAVYYCVRHGNFGDSYV | |
| | SWFAYWGQGTLVTVSSGKPGSGKPGSGKPGSGKPGSQAVVTQE | |
| | PSLTVSPGGTVTLTCGSSTGAVTTSNYANWVQQKPGKSPRGLIGG | |
| | TNKRAPGVPARFSGSLLGGKAALTISGAQPEDEADYYCALWYSNH | |
| | WVFGGGTKLTVLEPKSSDKTHTCPPCPAPEFEGGPSVFLFPPKPK | |
| | DTLMISRTPEVTCVVVDVSHEDPEVKFNWYVDGVEVHNAKTKPRE | |
| | EQYNSTYRVVSVLTVLHQDWLNGKEYKCKVSNKALPASIEKTISKA | |
| | KGQPREPQVYTLPPCRKKLTKNQVSLTCLVKGFYPSDIAVEWESN | |
| | GQPENNYKTTPPVLKSDGSFFLYSKLTVDKSRWQQGNVFSCSVM | |
| | HEALHNHYTQKSLSLSPGK | |
| 342 | QVQLVQSGAEVKKPGASVKVSCKATDYIFSNYYIEWVRQAPGQGL | DLL3Scfv- |
| | EWMGEILPGTGNTVYNEKFKDRVTMTVDTSTSTVYMELSSLRSED | CD3Scfv-Fv |
| | TAVYYCARWGDYALFANWGQGTLVTVSSGGGGSGGGGSGGGG | |
| | SDIQMTQSPSTLSASVGDRVTITCKASQNVGTNVAWYQQKPGKAP | |
| | KALIYSASYRYSGVPSRFSGSGSGTEFTLTISSLQPDDFATYYCQQ | |
| | YNSYPFTFGQGTKLEIKSGGGSEVQLVESGGGLVQPGGSLRLSCA | |
| | ASGFTFSTYAMNWVRQAPGKGLEWVGRIRSKYNNYATYYADSVK | |
| | GRFTISRDDSKNTLYLQMNSLRAEDTAVYYCVRHGNFGDSYVSW | |
| | FAYWGQGTLVTVSSGKPGSGKPGSGKPGSGKPGSQAVVTQEPS | |
| | LTVSPGGTVTLTCGSSTGAVTTSNYANWVQQKPGKSPRGLIGGTN | |
| | KRAPGVPARFSGSLLGGKAALTISGAQPEDEADYYCALWYSNHW | |
| | VFGGGTKLTVLEPKSSDKTHTCPPCPAPEFEGGPSVFLFPPKPKD | |
| | TLMISRTPEVTCVVVDVSHEDPEVKFNWYVDGVEVHNAKTKPREE | |
| | QYNSTYRVVSVLTVLHQDWLNGKEYKCKVSNKALPASIEKTISKAK | |
| | GQPREPQVYTLPPCRKKLTKNQVSLTCLVKGFYPSDIAVEWESNG | |
| | QPENNYKTTPPVLKSDGSFFLYSKLTVDKSRWQQGNVFSCSVMH | |
| | EALHNHYTQKSLSLSPGK | |
| 343 | QVQLVQSGAEVKKPGASVKVSCKASGYTFTDYFMNWVRQAPGQ | DLL3Scfv- |
| | GLEWMGVINPYNDITIYNQKFQGRVTMTVDRSTSTVYMELSSLRS | CD3Scfv-Fv |
| | EDTAVYYCAREGVLYDGYYEGAYWGQGTLVTVSSGGGGSGGGG | |
| | SGGGGSDIQLTQSPSFLSASVGDRVTITCKASQNVGIAVAWYQQK | |
| | PGKAPKLLIYAASNRYTGVPSRFSGSGSGTEFTLTISSLQPEDFAT | |
| | YYCQQYSTYPYTFGQGTKLEIKSGGGSEVQLVESGGGLVQPGGS | |
| | LRLSCAASGFTFSTYAMNWVRQAPGKGLEWVGRIRSKYNNYATY | |
| | YADSVKGRFTISRDDSKNTLYLQMNSLRAEDTAVYYCVRHGNFGD | |
| | SYVSWFAYWGQGTLVTVSSGKPGSGKPGSGKPGSGKPGSQAVV | |
| | TQEPSLTVSPGGTVTLTCGSSTGAVTTSNYANWVQQKPGKSPRG | |
| | LIGGTNKRAPGVPARFSGSLLGGKAALTISGAQPEDEADYYCALW | |
| | YSNHWVFGGGTKLTVLEPKSSDKTHTCPPCPAPEFEGGPSVFLFP | |
| | PKPKDTLMISRTPEVTCVVVDVSHEDPEVKFNWYVDGVEVHNAKT | |
| | KPREEQYNSTYRVVSVLTVLHQDWLNGKEYKCKVSNKALPASIEK | |
| | TISKAKGQPREPQVYTLPPCRKKLTKNQVSLTCLVKGFYPSDIAVE | |
| | WESNGQPENNYKTTPPVLKSDGSFFLYSKLTVDKSRWQQGNVFS | |
| | CSVMHEALHNHYTQKSLSLSPGK | |
| 344 | QVQLVQSGAEVKKPGASVKVSCKASGYTFTDYFMNWVRQAPGQ | DLL3Scfv- |
| | CLEWMGVINPYNDITIYNQKFQGRVTMTVDRSTSTVYMELSSLRS | CD3Scfv-Fv |
| | EDTAVYYCAREGVLYDGYYEGAYWGQGTLVTVSSGGGGSGGGG | |
| | SGGGGSDIQLTQSPSFLSASVGDRVTITCKASQNVGIAVAWYQQK | |
| | PGKAPKLLIYAASNRYTGVPSRFSGSGSGTEFTLTISSLQPEDFAT | |
| | YYCQQYSTYPYTFGCGTKLEIKSGGGSEVQLVESGGGLVQPGGS | |
| | LRLSCAASGFTFSTYAMNWVRQAPGKGLEWVGRIRSKYNNYATY | |
| | YADSVKGRFTISRDDSKNTLYLQMNSLRAEDTAVYYCVRHGNFGD | |
| | SYVSWFEYWGQGTLVTVSSGKPGSGKPGSGKPGSGKPGSQAVV | |
| | TQEPSLTVSPGGTVTLTCGSSTGAVTTSNYANWVQQKPGKSPRG | |
| | LIGGTNKRAPGVPARFSGSLLGGKAALTISGAQPEDEADYYCALW | |
| | YSNHWVFGGGTKLTVLEPKSSDKTHTCPPCPAPEFEGGPSVFLFP | |
| | PKPKDTLMISRTPEVTCVVVDVSHEDPEVKFNWYVDGVEVHNAKT | |
| | KPREEQYNSTYRVVSVLTVLHQDWLNGKEYKCKVSNKALPASIEK | |
| | TISKAKGQPREPQVYTLPPCRKKLTKNQVSLTCLVKGFYPSDIAVE | |
| | WESNGQPENNYKTTPPVLKSDGSFFLYSKLTVDKSRWQQGNVFS | |
| | CSVMHEALHNHYTQKSLSLSPGK | |
| 345 | QVQLVQSGAEVKKPGASVKVSCKATDYIFSNYYIEWVRQAPGQGL | DLL3Scfv- |
| | EWMGEILPGTGNTVYNEKFKDRVTMTVDTSTSTVYMELSSLRSED | CD3Scfv-Fv |
| | TAVYYCARWGDYALFANWGQGTLVTVSSGGGGSGGGGSGGGG | |
| | SDIQMTQSPSFLSASVGDRVTITCKASQNVGTNVAWYQQKPGKAP | |
| | KPLIYSTSYRYSGVPSRFSGSGSGTEFTLTISSLQPEDFATYYCQQ | |
| | YNNYPLTFGGGTKVEIKSGGGSEVQLVESGGGLVQPGGSLRLSC | |
| | AASGFTFSTYAMNWVRQAPGKGLEWVGRIRSKYNNYATYYADSV | |
| | KGRFTISRDDSKNTLYLQMNSLRAEDTAVYYCVRHGNFGDSYVS | |
| | WFAYWGQGTLVTVSSGKPGSGKPGSGKPGSGKPGSQAVVTQEP | |
| | SLTVSPGGTVTLTCGSSTGAVTTSNYANWVQQKPGKSPRGLIGGT | |
| | NKRAPGVPARFSGSLLGGKAALTISGAQPEDEADYYCALWYSNH | |
| | WVFGGGTKLTVLEPKSSDKTHTCPPCPAPEFEGGPSVFLFPPKPK | |
| | DTLMISRTPEVTCVVVDVSHEDPEVKFNWYVDGVEVHNAKTKPRE | |
| | EQYNSTYRVVSVLTVLHQDWLNGKEYKCKVSNKALPASIEKTISKA | |
| | KGQPREPQVYTLPPCRKKLTKNQVSLTCLVKGFYPSDIAVEWESN | |
| | GQPENNYKTTPPVLKSDGSFFLYSKLTVDKSRWQQGNVFSCSVM | |
| | HEALHNHYTQKSLSLSPGK | |
| 346 | QVQLVQSGAEVKKPGASVKVSCKASGYTFTDYFMNWVRQAPGQ | DLL3Scfv- |
| | GLEWMGVINPYNDITIYNQKFQGRVTMTVDRSTSTVYMELSSLRS | CD3Scfv-Fv |
| | EDTAVYYCAREGVLYDGYYEGAYWGQGTLVTVSSGGGGSGGGG | |
| | SGGGGSDIQLTQSPSFLSASVGDRVTITCKASQNVGIAVAWYQQK | |
| | PGKAPKLLIYAASNRYTGVPSRFSGSGSGTEFTLTISSLQPEDFAT | |
| | YYCQQYSTYPYTFGQGTKLEIKSGGGSEVQLVESGGGLVQPGGS | |
| | LRLSCAASGFTFSTYAMNWVRQAPGKGLEWVGRIRSKYNNYATY | |
| | YADSVKGRFTISRDDSKNTLYLQMNSLRAEDTAVYYCVRHGNFGD | |
| | SYVSWFAYWGQGTLVTVSSGKPGSGKPGSGKPGSGKPGSQAVV | |
| | TQEPSLTVSPGGTVTLTCGSSTGAVTTSNYANWVQQKPGKSPRG | |
| | LIGGTNKRAPGVPARFSGSLLGGKAALTISGAQPEDEADYYCALW | |
| | YSNHWVFGGGTKLTVLEPKSSDKTHTCPPCPAPEFEGGPSVFLFP | |
| | PKPKDTLMISRTPEVTCVVVDVSHEDPEVKFNWYVDGVEVHNAKT | |
| | KPREEQYNSTYRVVSVLTVLHQDWLNGKEYKCKVSNKALPASIEK | |
| | TISKAKGQPREPQVYTLPPCRKKLTKNQVSLTCLVKGFYPSDIAVE | |
| | WESNGQPENNYKTTPPVLKSDGSFFLYSKLTVDKSRWQQGNVFS | |
| | CSVMHEALHNHYTQKSLSLSPGK | |
| 347 | QVQLVQSGAEVKKPGASVKVSCKASGYTFTDYFMNWVRQAPGQ | DLL3Scfv- |
| | GLEWMGVINPYNDITIYNQKFQGRVTMTVDRSTSTVYMELSSLRS | CD3Scfv-Fv |
| | EDTAVYYCAREGVLYDGYYEGAYWGQGTLVTVSSGGGGSGGGG | |
| | SGGGGSDIQLTQSPSFLSASVGDRVTITCKASQNVGIAVAWYQQK | |
| | PGKAPKLLIYAASNRYTGVPSRFSGSGSGTEFTLTISSLQPEDFAT | |
| | YYCQQYSTYPYTFGQGTKLEIKSGGGSEVQLVESGGGLVQPGGS | |
| | LRLSCAASGFTFSTYAMNWVRQAPGKGLEWVGRIRSKYNNYATY | |
| | YADSVKGRFTISRDDSKNTLYLQMNSLRAEDTAVYYCVRHGNFGD | |
| | SYVSWFEYWGQGTLVTVSSGKPGSGKPGSGKPGSGKPGSQAVV | |
| | TQEPSLTVSPGGTVTLTCGSSTGAVTTSNYANWVQQKPGKSPRG | |
| | LIGGTNKRAPGVPARFSGSLLGGKAALTISGAQPEDEADYYCALW | |
| | YSNHWVFGGGTKLTVLEPKSSDKTHTCPPCPAPEFEGGPSVFLFP | |
| | PKPKDTLMISRTPEVTCVVVDVSHEDPEVKFNWYVDGVEVHNAKT | |
| | KPREEQYNSTYRVVSVLTVLHQDWLNGKEYKCKVSNKALPASIEK | |
| | TISKAKGQPREPQVYTLPPCRKKLTKNQVSLTCLVKGFYPSDIAVE | |
| | WESNGQPENNYKTTPPVLKSDGSFFLYSKLTVDKSRWQQGNVFS | |
| | CSVMHEALHNHYTQKSLSLSPGK | |
| 348 | QVQLVQSGAEVKKPGASVKVSCKASGYTFTDYFMNWVRQAPGQ | DLL3Scfv- |
| | GLEWMGVINPYNDITIYNQKFQGRVTMTVDRSTSTVYMELSSLRS | CD3Scfv-Fv |
| | EDTAVYYCAREGVLYDGYYEGAYWGQGTLVTVSSGGGGSGGGG | |
| | SGGGGSDIQLTQSPSFLSASVGDRVTITCKASQNVGIAVAWYQQK | |
| | PGKAPKLLIYAASNRYTGVPSRFSGSGSGTEFTLTISSLQPEDFAT | |
| | YYCQQYSTYPYTFGQGTKLEIKSGGGSEVQLVESGGGLVQPGGS | |
| | LRLSCAASGFTFSTYAMNWVRQAPGKGLEWVGRIRSKYNNYATY | |
| | YADSVKGRFTISRDDSKNTLYLQMNSLRAEDTAVYYCVRHGNFGD | |
| | SYVSWFNYWGQGTLVTVSSGKPGSGKPGSGKPGSGKPGSQAVV | |
| | TQEPSLTVSPGGTVTLTCGSSTGAVTTSNYANWVQQKPGKSPRG | |
| | LIGGTNKRAPGVPARFSGSLLGGKAALTISGAQPEDEADYYCALW | |
| | YSNHWVFGGGTKLTVLEPKSSDKTHTCPPCPAPEFEGGPSVFLFP | |
| | PKPKDTLMISRTPEVTCVVVDVSHEDPEVKFNWYVDGVEVHNAKT | |
| | KPREEQYNSTYRVVSVLTVLHQDWLNGKEYKCKVSNKALPASIEK | |
| | TISKAKGQPREPQVYTLPPCRKKLTKNQVSLTCLVKGFYPSDIAVE | |
| | WESNGQPENNYKTTPPVLKSDGSFFLYSKLTVDKSRWQQGNVFS | |
| | CSVMHEALHNHYTQKSLSLSPGK | |
| 349 | EVQLVQSGAEVKKPGESLKISCKGSGYEFSSHVVMNWVRQMPGK | Muc17scfv- |
| | CLEWMGQIYPGDGDINYNEKFRGQVTISADKSISTAYLQWSSLKAS | CD3scfv |
| | DTAMYYCARHGNYVMDYWGQGTLVTVSSGGGGSGGGGSGGGG | |
| | SGGGGSIQLTQSPSFLSASVGDRVTITCSASSSVSYMFWYQQKPG | |
| | KAPKPWIYRTSNLASGVPSRFSGSGSGTEFTLTISSLQPEDFATYY | |
| | CQQFHDYPRTFGCGTKVEIKSGGGSEVQLVESGGGLVQPGGSLR | |
| | LSCAASGFTFSTYAMNWVRQAPGKGLEWVGRIRSKYNNYATYYA | |
| | DSVKGRFTISRDDSKNTLYLQMNSLRAEDTAVYYCVRHGNFGDSY | |
| | VSWFEYWGQGTLVTVSSGKPGSGKPGSGKPGSGKPGSQAVVTQ | |
| | EPSLTVSPGGTVTLTCGSSTGAVTTSNYANWVQQKPGKSPRGLIG | |
| | GTNKRAPGVPARFSGSLLGGKAALTISGAQPEDEADYYCALWYSN | |
| | HWVFGGGTKLTVLEPKSSDKTHTCPPCPAPEFEGGPSVFLFPPKP | |
| | KDTLMISRTPEVTCVVVDVSHEDPEVKFNWYVDGVEVHNAKTKPR | |
| | EEQYNSTYRVVSVLTVLHQDWLNGKEYKCKVSNKALPASIEKTISK | |
| | AKGQPREPQVYTLPPCRKKLTKNQVSLTCLVKGFYPSDIAVEWES | |
| | NGQPENNYKTTPPVLKSDGSFFLYSKLTVDKSRWQQGNVFSCSV | |
| | MHEALHNHYTQKSLSLSPGK | |
| 350 | EVQLVQSGAEVKKPGESLKISCKGSGYEFSSHVVMNWVRQMPGK | Muc17scfv- |
| | GLEWMGQIYPGDGDINYNEKFRGQVTISADKSISTAYLQWSSLKA | CD3scfv |
| | SDTAMYYCARHGNYVMDYWGQGTLVTVSSGGGGSGGGGSGGG | |
| | GSGGGGSIQLTQSPSFLSASVGDRVTITCSASSSVSYMFVVYQQKP | |
| | GKAPKPWIYRTSNLASGVPSRFSGSGSGTEFTLTISSLQPEDFATY | |
| | YCQQFHDYPRTFGGGTKVEIKSGGGSEVQLVESGGGLVQPGGSL | |
| | RLSCAASGFTFSTYAMNWVRQAPGKGLEWVGRIRSKYNNYATYY | |
| | ADSVKGRFTISRDDSKNTLYLQMNSLRAEDTAVYYCVRHGNFGDS | |
| | YVSWFAYWGQGTLVTVSSGKPGSGKPGSGKPGSGKPGSQAVVT | |
| | QEPSLTVSPGGTVTLTCGSSTGAVTTSNYANWVQQKPGKSPRGLI | |
| | GGTNKRAPGVPARFSGSLLGGKAALTISGAQPEDEADYYCALWYS | |
| | NHWVFGGGTKLTVLEPKSSDKTHTCPPCPAPEFEGGPSVFLFPPK | |
| | PKDTLMISRTPEVTCVVVDVSHEDPEVKFNWYVDGVEVHNAKTKP | |
| | REEQYNSTYRVVSVLTVLHQDWLNGKEYKCKVSNKALPASIEKTIS | |
| | KAKGQPREPQVYTLPPCRKKLTKNQVSLTCLVKGFYPSDIAVEWE | |
| | SNGQPENNYKTTPPVLKSDGSFFLYSKLTVDKSRWQQGNVFSCS | |
| | VMHEALHNHYTQKSLSLSPGK | |
| 351 | QVQLQQWGAGLLKPSETLSLTCAVYGGSFSGYYWSWIRQPPGKC | Muc17scfv- |
| | LEWIGDIDASGSTKYNPSLKSRVTISLDTSKNQFSLKLNSVTAADTA | CD3scfv |
| | VYFCARKKYSTVWSYFDNWGQGTLVTVSSGGGGSGGGGSGGG | |
| | GSSYELTQPSSVSVPPGQTASITCSGDKLGDKYASVVYQQKPGQS | |
| | PVLVIYQDRKRPSGVPERFSGSNSGNTATLTISGTQAMDEADYYC | |
| | QAWGSSTAVFGCGTKLTVLSGGGGSEVQLVESGGGLVQPGGSL | |
| | KLSCAASGFTFNKYAMNWVRQAPGKGLEWVARIRSKYNNYATYY | |
| | ADSVKDRFTISRDDSKNTAYLQMNNLKTEDTAVYYCVRHGNFGNS | |
| | YISYWAYWGQGTLVTVSSGGGGSGGGGSGGGGSQTVVTQEPSL | |
| | TVSPGGTVTLTCGSSTGAVTSGNYPNWVQQKPGQAPRGLIGGTK | |
| | FLAPGTPARFSGSLLGGKAALTLSGVQPEDEAEYYCVLWYSNRW | |
| | VFGGGTKLTVLGGGGDKTHTCPPCPAPELLGGPSVFLFPPKPKDT | |
| | LMISRTPEVTCVVVDVSHEDPEVKFNWYVDGVEVHNAKTKPCEEQ | |
| | YGSTYRCVSVLTVLHQDWLNGKEYKCKVSNKALPAPIEKTISKAKG | |
| | QPREPQVYTLPPSREEMTKNQVSLTCLVKGFYPSDIAVEWESNGQ | |
| | PENNYKTTPPVLDSDGSFFLYSKLTVDKSRWQQGNVFSCSVMHE | |
| | ALHNHYTQKSLSLSPGKGGGGSGGGGSGGGGSGGGGSGGGGS | |
| | GGGGSDKTHTCPPCPAPELLGGPSVFLFPPKPKDTLMISRTPEVT | |
| | CVVVDVSHEDPEVKFNWYVDGVEVHNAKTKPCEEQYGSTYRCVS | |
| | VLTVLHQDWLNGKEYKCKVSNKALPAPIEKTISKAKGQPREPQVYT | |
| | LPPSREEMTKNQVSLTCLVKGFYPSDIAVEWESNGQPENNYKTTP | |
| | PVLDSDGSFFLYSKLTVDKSRWQQGNVF | |
| | SCSVMHEALHNHYTQKSLSLSPGK | |
| 352 | QVQLVESGGGWQPGRSLRLSCAASGFTFSNHGMHWVRQAPGK | Muc17scfv- |
| | CLEWVAGIWSEGSNKYYADAVKGRFTISRDNSKNTLYLQMNSLRA | CD3scfv |
| | EDTAVYYCARATYTTGWSYFDYWGQGTLVTVSSGGGGSGGGGS | |
| | GGGGSSYELTQPPSVSVSPGQTASITCSGDKLGDKYASVVYQQKS | |
| | GQSPV | |
| | LVIYQDAKRPSGIPERFSGSNSGNTATLTISGTQAMDEADYYCQAF | |
| | HQSTWVFGCGTQLT | |
| | VLSGGGGSEVQLVESGGGLVQPGGSLKLSCAASGFTFNKYAMN | |
| | WVRQAPGKGLEWVARIR | |
| | SKYNNYATYYADSVKDRFTISRDDSKNTAYLQMNNLKTEDTAVYY | |
| | CVRHGNFGNSYISYW | |
| | AYWGQGTLVTVSSGGGGSGGGGSGGGGSQTVVTQEPSLTVSPG | |
| | GTVTLTCGSSTGAVTSG | |
| | NYPNWVQQKPGQAPRGLIGGTKFLAPGTPARFSGSLLGGKAALTL | |
| | SGVQPEDEAEYYCVL | |
| | WYSNRWVFGGGTKLTVLGGGGDKTHTCPPCPAPELLGGPSVFLF | |
| | PPKPKDTLMISRTPEV | |
| | TCVVVDVSHEDPEVKFNWYVDGVEVHNAKTKPCEEQYGSTYRCV | |
| | SVLTVLHQDWLNGKEY | |
| | KCKVSNKALPAPIEKTISKAKGQPREPQVYTLPPSREEMTKNQVSL | |
| | TCLVKGFYPSDIAVEWESNGQPENNYKTTPPVLDSDGSFFLYSKL | |
| | TVDKSRWQQGNVFSCSVMHEALHNHYTQKSLSLSPGKGGGGSG | |
| | GGGSGGGGSGGGGSGGGGSGGGGSDKTHTCPPCPAPELLGGP | |
| | SVFLFPPKPKDTLMISRTPEVTCVVVDVSHEDPEVKFNWYVDGVE | |
| | VHNAKTKPCEEQYGSTYRCVSVLTVLHQDWLNGKEYKCKVSNKA | |
| | LPAPIEKTISKAKGQPREPQVYTLPPSREEMTKNQVSLTCLVKGFY | |
| | PSDIAVEWESNGQPENNYKTTPPVLDSDGSFFLYSKLTVDKSRWQ | |
| | QGNVFSCSVMHEALHNHYTQKSLSLSPGK | |
| 353 | QVQLVQSGAEVKKPGSSVKVSCKASGYTFTSYWLNWVRQAPGQ | Muc17scfv- |
| | GLEWMGMIHPSDSESRLNQKFKDRVTITADKSTSTAYMELSSLRS | CD3scfv |
| | EDTAVYYCARQGIITSVQEFAYWGQGTLVTVSSGGGGSGGGGSG | |
| | GGGSGGGGSIQMTQSPSSLSASVGDRVTITCSASSSVNYIFVVYQQ | |
| | KPGKAPKLLIYRTSNLASGVPSRFSGSGSGTDFTLTISSLQPEDFAT | |
| | YYCQQYHSYPLTFGGGTKVEIKSGGGGSEVQLVESGGGLVQPGG | |
| | SLRLSCAASGFTFSTYAMNWVRQAPGKGLEWVGRIRSKYNNYAT | |
| | YYADSVKGRFTISRDDSKNTLYLQMNSLRAEDTAVYYCVRHGNFG | |
| | DSYVSWFEYWGQGTLVTVSSGKPGSGKPGSGKPGSGKPGSQAV | |
| | VTQEPSLTVSPGGTVTLTCGSSTGAVTTSNYANWVQQKPGKSPR | |
| | GLIGGTNKRAPGVPARFSGSLLGGKAALTISGAQPEDEADYYCAL | |
| | WYSNHWVFGGGTKLTVLEPKSSDKTHTCPPCPAPEFEGGPSVFL | |
| | FPPKPKDTLMISRTPEVTCVVVDVSHEDPEVKFNWYVDGVEVHNA | |
| | KTKPREEQYNSTYRVVSVLTVLHQDWLNGKEYKCKVSNKALPASI | |
| | EKTISKAKGQPREPQVYTLPPCRKKLTKNQVSLTCLVKGFYPSDIA | |
| | VEWESNGQPENNYKTTPPVLKSDGSFFLYSKLTVDKSRWQQGNV | |
| | FSCSVMHEALHNHYTQKSLSLSPGK | |
| 354 | QVQLVQSGAEVKKPGSSVKVSCKASGYTFTSYWLNWVRQAPGQ | Muc17scfv- |
| | GLEWMGMIHPSDSESRLNQKFKDRVTITADKSTSTAYMELSSLRS | CD3scfv |
| | EDTAVYYCARQGIITSVQEFAYWGQGTLVTVSSGGGGSGGGGSG | |
| | GGGSGGGGSIQMTQSPSSLSASVGDRVTITCSASSSVNYIFWYQQ | |
| | KPGKAPKLLIYRTSNLASGVPSRFSGSGSGTDFTLTISSLQPEDFAT | |
| | YYCQQYHSYPLTFGGGTKVEIKSGGGSEVQLVESGGGLVQPGGS | |
| | LRLSCAASGFTFSTYAMNWVRQAPGKGLEWVGRIRSKYNNYATY | |
| | YADSVKGRFTISRDDSKNTLYLQMNSLRAEDTAVYYCVRHGNFGD | |
| | SYVSWFEYWGQGTLVTVSSGKPGSGKPGSGKPGSGKPGSQAVV | |
| | TQEPSLTVSPGGTVTLTCGSSTGAVTTSNYANWVQQKPGKSPRG | |
| | LIGGTNKRAPGVPARFSGSLLGGKAALTISGAQPEDEADYYCALW | |
| | YSNHWVFGGGTKLTVLEPKSSDKTHTCPPCPAPEFEGGPSVFLFP | |
| | PKPKDTLMISRTPEVTCVVVDVSHEDPEVKFNWYVDGVEVHNAKT | |
| | KPREEQYNSTYRVVSVLTVLHQDWLNGKEYKCKVSNKALPASIEK | |
| | TISKAKGQPREPQVYTLPPCRKKLTKNQVSLTCLVKGFYPSDIAVE | |
| | WESNGQPENNYKTTPPVLKSDGSFFLYSKLTVDKSRWQQGNVFS | |
| | CSVMHEALHNHYTQKSLSLSPGK | |
| 355 | QVQLVQSGAEVKKPGSSVKVSCKASGYTFTSYWLNWVRQAPGQ | Muc17scfv- |
| | GLEWMGMIHPSDSESRLNQKFKDRVTITADKSTSTAYMELSSLRS | CD3scfv |
| | EDTAVYYCARQGIITSVQEFAYWGQGTLVTVSSGGGGSGGGGSG | |
| | GGGSGGGGSIQMTQSPSSLSASVGDRVTITCSASSSVNYIYWYQ | |
| | QKPGKAPKLLIYRTSNLASGVPSRFSGSGSGTDFTLTISSLQPEDF | |
| | ATYYCQQYHSYPLTFGGGTKVEIKSGGGGSEVQLVESGGGLVQP | |
| | GGSLRLSCAASGFTFSTYAMNWVRQAPGKGLEWVGRIRSKYNNY | |
| | ATYYADSVKGRFTISRDDSKNTLYLQMNSLRAEDTAVYYCVRHGN | |
| | FGDSYVSWFEYWGQGTLVTVSSGKPGSGKPGSGKPGSGKPGSQ | |
| | AVVTQEPSLTVSPGGTVTLTCGSSTGAVTTSNYANWVQQKPGKS | |
| | PRGLIGGTNKRAPGVPARFSGSLLGGKAALTISGAQPEDEADYYC | |
| | ALWYSNHWVFGGGTKLTVLEPKSSDKTHTCPPCPAPEFEGGPSV | |
| | FLFPPKPKDTLMISRTPEVTCVVVDVSHEDPEVKFNWYVDGVEVH | |
| | NAKTKPREEQYNSTYRVVSVLTVLHQDWLNGKEYKCKVSNKALPA | |
| | SIEKTISKAKGQPREPQVYTLPPCRKKLTKNQVSLTCLVKGFYPSDI | |
| | AVEWESNGQPENNYKTTPPVLKSDGSFFLYSKLTVDKSRWQQGN | |
| | VFSCSVMHEALHNHYTQKSLSLSPGK | |
| 356 | QVQLVQSGAEVKKPGSSVKVSCKASGYTFTSYWLNWVRQAPGQ | Muc17scfv- |
| | GLEWMGMIHPSDSETRLNQKFKDRVTITADKSTSTAYMELSSLRS | CD3scfv |
| | EDTAVYYCARQGIITSVQEFAYWGQGTLVTVSSGGGGSGGGGSG | |
| | GGGSGGGGSIQMTQSPSSLSASVGDRVTITCSASSSVNYIFWYQQ | |
| | KPGKAPKLLIYRTSNLASGVPSRFSGSGSGTDFTLTISSLQPEDFAT | |
| | YYCQQYHSYPLTFGGGTKVEIKSGGGGSEVQLVESGGGLVQPGG | |
| | SLRLSCAASGFTFSTYAMNWVRQAPGKGLEWVGRIRSKYNNYAT | |
| | YYADSVKGRFTISRDDSKNTLYLQMNSLRAEDTAVYYCVRHGNFG | |
| | DSYVSWFEYWGQGTLVTVSSGKPGSGKPGSGKPGSGKPGSQAV | |
| | VTQEPSLTVSPGGTVTLTCGSSTGAVTTSNYANWVQQKPGKSPR | |
| | GLIGGTNKRAPGVPARFSGSLLGGKAALTISGAQPEDEADYYCAL | |
| | WYSNHWVFGGGTKLTVLEPKSSDKTHTCPPCPAPEFEGGPSVFL | |
| | FPPKPKDTLMISRTPEVTCVVVDVSHEDPEVKFNWYVDGVEVHNA | |
| | KTKPREEQYNSTYRVVSVLTVLHQDWLNGKEYKCKVSNKALPASI | |
| | EKTISKAKGQPREPQVYTLPPCRKKLTKNQVSLTCLVKGFYPSDIA | |
| | VEWESNGQPENNYKTTPPVLKSDGSFFLYSKLTVDKSRWQQGNV | |
| | FSCSVMHEALHNHYTQKSLSLSPGK | |
| 357 | QVQLVQSGAEVKKPGSSVKVSCKASGYTFTSYWLNWVRQAPGQ | Muc17scfv- |
| | GLEWMGMIHPSDSETRLNQKFKDRVTITADKSTSTAYMELSSLRS | CD3scfv |
| | EDTAVYYCARQGIITSVQEFAYWGQGTLVTVSSGGGGSGGGGSG | |
| | GGGSGGGGSIQMTQSPSSLSASVGDRVTITCSASSSVNYIYWYQ | |
| | QKPGKAPKLLIYRTSNLASGVPSRFSGSGSGTDFTLTISSLQPEDF | |
| | ATYYCQQYHSYPLTFGGGTKVEIKSGGGGSEVQLVESGGGLVQP | |
| | GGSLRLSCAASGFTFSTYAMNWVRQAPGKGLEWVGRIRSKYNNY | |
| | ATYYADSVKGRFTISRDDSKNTLYLQMNSLRAEDTAVYYCVRHGN | |
| | FGDSYVSWFEYWGQGTLVTVSSGKPGSGKPGSGKPGSGKPGSQ | |
| | AVVTQEPSLTVSPGGTVTLTCGSSTGAVTTSNYANWVQQKPGKS | |
| | PRGLIGGTNKRAPGVPARFSGSLLGGKAALTISGAQPEDEADYYC | |
| | ALWYSNHWVFGGGTKLTVLEPKSSDKTHTCPPCPAPEFEGGPSV | |
| | FLFPPKPKDTLMISRTPEVTCVVVDVSHEDPEVKFNWYVDGVEVH | |
| | NAKTKPREEQYNSTYRVVSVLTVLHQDWLNGKEYKCKVSNKALPA | |
| | SIEKTISKAKGQPREPQVYTLPPCRKKLTKNQVSLTCLVKGFYPSDI | |
| | AVEWESNGQPENNYKTTPPVLKSDGSFFLYSKLTVDKSRWQQGN | |
| | VFSCSVMHEALHNHYTQKSLSLSPGK | |
| 358 | QVQLVQSGAEVKKPGSSVKVSCKASGYTFTSYWMNWVRQAPGQ | Muc17scfv- |
| | GLEWMGMIHPSDSESRLNQKFKDRVTITADKSTSTAYMELSSLRS | CD3scfv |
| | EDTAVYYCARQGIITSVQEFAYWGQGTLVTVSSGGGGSGGGGSG | |
| | GGGSGGGGSIQMTQSPSSLSASVGDRVTITCSASSSVNYIFWYQQ | |
| | KPGKAPKLLIYRTSNLASGVPSRFSGSGSGTDFTLTISSLQPEDFAT | |
| | YYCQQYHSYPLTFGGGTKVEIKSGGGGSEVQLVESGGGLVQPGG | |
| | SLRLSCAASGFTFSTYAMNWVRQAPGKGLEWVGRIRSKYNNYAT | |
| | YYADSVKGRFTISRDDSKNTLYLQMNSLRAEDTAVYYCVRHGNFG | |
| | DSYVSWFEYWGQGTLVTVSSGKPGSGKPGSGKPGSGKPGSQAV | |
| | VTQEPSLTVSPGGTVTLTCGSSTGAVTTSNYANWVQQKPGKSPR | |
| | GLIGGTNKRAPGVPARFSGSLLGGKAALTISGAQPEDEADYYCAL | |
| | WYSNHWVFGGGTKLTVLEPKSSDKTHTCPPCPAPEFEGGPSVFL | |
| | FPPKPKDTLMISRTPEVTCVVVDVSHEDPEVKFNWYVDGVEVHNA | |
| | KTKPREEQYNSTYRVVSVLTVLHQDWLNGKEYKCKVSNKALPASI | |
| | EKTISKAKGQPREPQVYTLPPCRKKLTKNQVSLTCLVKGFYPSDIA | |
| | VEWESNGQPENNYKTTPPVLKSDGSFFLYSKLTVDKSRWQQGNV | |
| | FSCSVMHEALHNHYTQKSLSLSPG | |
| 359 | QVQLVQSGAEVKKPGSSVKVSCKASGYTFTSYWMNWVRQAPGQ | Muc17scfv- |
| | GLEWMGMIHPSDSESRLNQKFKDRVTITADKSTSTAYMELSSLRS | CD3scfv |
| | EDTAVYYCARQGIITSVQEFAYWGQGTLVTVSSGGGGSGGGGSG | |
| | GGGSGGGGSIQMTQSPSSLSASVGDRVTITCSASSSVNYIYWYQ | |
| | QKPGKAPKLLIYRTSNLASGVPSRFSGSGSGTDFTLTISSLQPEDF | |
| | ATYYCQQYHSYPLTFGGGTKVEIKSGGGGSEVQLVESGGGLVQP | |
| | GGSLRLSCAASGFTFSTYAMNWVRQAPGKGLEWVGRIRSKYNNY | |
| | ATYYADSVKGRFTISRDDSKNTLYLQMNSLRAEDTAVYYCVRHGN | |
| | FGDSYVSWFEYWGQGTLVTVSSGKPGSGKPGSGKPGSGKPGSQ | |
| | AVVTQEPSLTVSPGGTVTLTCGSSTGAVTTSNYANWVQQKPGKS | |
| | PRGLIGGTNKRAPGVPARFSGSLLGGKAALTISGAQPEDEADYYC | |
| | ALWYSNHWVFGGGTKLTVLEPKSSDKTHTCPPCPAPEFEGGPSV | |
| | FLFPPKPKDTLMISRTPEVTCVVVDVSHEDPEVKFNWYVDGVEVH | |
| | NAKTKPREEQYNSTYRVVSVLTVLHQDWLNGKEYKCKVSNKALPA | |
| | SIEKTISKAKGQPREPQVYTLPPCRKKLTKNQVSLTCLVKGFYPSDI | |
| | AVEWESNGQPENNYKTTPPVLKSDGSFFLYSKLTVDKSRWQQGN | |
| | VFSCSVMHEALHNHYTQKSLSLSPGK | |
| 360 | QVQLVQSGAEVKKPGSSVKVSCKASGYTFTSYWMNWVRQAPGQ | Muc17scfv- |
| | GLEWMGMIHPSDSETRLNQKFKDRVTITADKSTSTAYMELSSLRS | CD3scfv |
| | EDTAVYYCARQGIITSVQEFAYWGQGTLVTVSSGGGGSGGGGSG | |
| | GGGSGGGGSIQMTQSPSSLSASVGDRVTITCSASSSVNYIFWYQQ | |
| | KPGKAPKLLIYRTSNLASGVPSRFSGSGSGTDFTLTISSLQPEDFAT | |
| | YYCQQYHSYPLTFGGGTKVEIKSGGGGSEVQLVESGGGLVQPGG | |
| | SLRLSCAASGFTFSTYAMNWVRQAPGKGLEWVGRIRSKYNNYAT | |
| | YYADSVKGRFTISRDDSKNTLYLQMNSLRAEDTAVYYCVRHGNFG | |
| | DSYVSWFEYWGQGTLVTVSSGKPGSGKPGSGKPGSGKPGSQAV | |
| | VTQEPSLTVSPGGTVTLTCGSSTGAVTTSNYANWVQQKPGKSPR | |
| | GLIGGTNKRAPGVPARFSGSLLGGKAALTISGAQPEDEADYYCAL | |
| | WYSNHWVFGGGTKLTVLEPKSSDKTHTCPPCPAPEFEGGPSVFL | |
| | FPPKPKDTLMISRTPEVTCVVVDVSHEDPEVKFNWYVDGVEVHNA | |
| | KTKPREEQYNSTYRVVSVLTVLHQDWLNGKEYKCKVSNKALPASI | |
| | EKTISKAKGQPREPQVYTLPPCRKKLTKNQVSLTCLVKGFYPSDIA | |
| | VEWESNGQPENNYKTTPPVLKSDGSFFLYSKLTVDKSRWQQGNV | |
| | FSCSVMHEALHNHYTQKSLSLSPGK | |
| 361 | QVQLVQSGAEVKKPGSSVKVSCKASGYTFTSYWMNWVRQAPGQ | Muc17scfv- |
| | GLEWMGMIHPSDSETRLNQKFKDRVTITADKSTSTAYMELSSLRS | CD3scfv |
| | EDTAVYYCARQGIITSVQEFAYWGQGTLVTVSSGGGGSGGGGSG | |
| | GGGSGGGGSIQMTQSPSSLSASVGDRVTITCSASSSVNYIYWYQ | |
| | QKPGKAPKLLIYRTSNLASGVPSRFSGSGSGTDFTLTISSLQPEDF | |
| | ATYYCQQYHSYPLTFGGGTKVEIKSGGGGSEVQLVESGGGLVQP | |
| | GGSLRLSCAASGFTFSTYAMNWVRQAPGKGLEWVGRIRSKYNNY | |
| | ATYYADSVKGRFTISRDDSKNTLYLQMNSLRAEDTAVYYCVRHGN | |
| | FGDSYVSWFEYWGQGTLVTVSSGKPGSGKPGSGKPGSGKPGSQ | |
| | AVVTQEPSLTVSPGGTVTLTCGSSTGAVTTSNYANWVQQKPGKS | |
| | PRGLIGGTNKRAPGVPARFSGSLLGGKAALTISGAQPEDEADYYC | |
| | ALWYSNHWVFGGGTKLTVLEPKSSDKTHTCPPCPAPEFEGGPSV | |
| | FLFPPKPKDTLMISRTPEVTCVVVDVSHEDPEVKFNWYVDGVEVH | |
| | NAKTKPREEQYNSTYRVVSVLTVLHQDWLNGKEYKCKVSNKALPA | |
| | SIEKTISKAKGQPREPQVYTLPPCRKKLTKNQVSLTCLVKGFYPSDI | |
| | AVEWESNGQPENNYKTTPPVLKSDGSFFLYSKLTVDKSRWQQGN | |
| | VFSCSVMHEALHNHYTQKSLSLSPG | |
| 362 | QVQLVQSGAEVKKPGSSVKVSCKASGYTFTSYWMNWVRQAPGQ | Muc17scfv- |
| | GLEWMGMIHPSDSETRLNQKFKDRVTITADKSTSTAYMELSSLRS | CD3scfv |
| | EDTAVYYCARQGIITSVQEFAYWGQGTLVTVSSGGGGSGGGGSG | |
| | GGGSGGGGSIQMTQSPSSLSASVGDRVTITCSASSSVNYIYWYQ | |
| | QKPGKAPKLLIYRTSNLASGVPSRFSGSGSGTDFTLTISSLQPEDF | |
| | ATYYCQQYHSYPLTFGGGTKVEIKSGGGSEVQLVESGGGLVQPG | |
| | GSLRLSCAASGFTFSTYAMNWVRQAPGKGLEWVGRIRSKINNYAT | |
| | YYADSVKGRFTISRDDSKNTLYLQMNSLRAEDTAVYYCVRHGNFG | |
| | DSYVSWFAYWGQGTLVTVSSGKPGSGKPGSGKPGSGKPGSQAV | |
| | VTQEPSLTVSPGGTVTLTCGSSTGAVTTSNYANWVQQKPGKSPR | |
| | GLIGGTNKRAPGVPARFSGSLLGGKAALTISGAQPEDEADYYCAL | |
| | WYSNHWVFGGGTKLTVLEPKSSDKTHTCPPCPAPEFEGGPSVFL | |
| | FPPKPKDTLMISRTPEVTCVVVDVSHEDPEVKFNWYVDGVEVHNA | |
| | KTKPREEQYNSTYRVVSVLTVLHQDWLNGKEYKCKVSNKALPASI | |
| | EKTISKAKGQPREPQVYTLPPCRKKLTKNQVSLTCLVKGFYPSDIA | |
| | VEWESNGQPENNYKTTPPVLKSDGSFFLYSKLTVDKSRWQQGNV | |
| | FSCSVMHEALHNHYTQKSLSLSPGK | |
| 363 | QVQLVQSGAEVKKPGSSVKVSCKASGYTFTSYWMNWVRQAPGQ | Muc17scfv- |
| | GLEWMGMIHPSDSETRLNQKFKDRVTITADKSTSTAYMELSSLRS | CD3scfv |
| | EDTAVYYCARQGIITSVQEFAYWGQGTLVTVSSGGGGSGGGGSG | |
| | GGGSGGGGSIQMTQSPSSLSASVGDRVTITCSASSSVNYIYWYQ | |
| | QKPGKAPKLLIYRTSNLASGVPSRFSGSGSGTDFTLTISSLQPEDF | |
| | ATYYCQQYHSYPLTFGGGTKVEIKSGGGSEVQLVESGGGLVQPG | |
| | GSLRLSCAASGFTFSTYAMNWVRQAPGKGLEWVGRIRSKYNNYA | |
| | TYYADSVKGRFTISRDDSKNTLYLQMNSLRAEDTAVYYCVRHGNF | |
| | GDSYVSWFAYWGQGTLVTVSSGKPGSGKPGSGKPGSGKPGSQA | |
| | VVTQEPSLTVSPGGTVTLTCGSSTGAVTTSNYANWVQQKPGKSP | |
| | RGLIGGTNKRAPGVPARFSGSLLGGKAALTISGAQPEDEADYYCA | |
| | LWYSNHWVFGGGTKLTVLEPKSSDKTHTCPPCPAPEFEGGPSVF | |
| | LFPPKPKDTLMISRTPEVTCVVVDVSHEDPEVKFNWYVDGVEVHN | |
| | AKTKPREEQYNSTYRVVSVLTVLHQDWLNGKEYKCKVSNKALPAS | |
| | IEKTISKAKGQPREPQVYTLPPCRKKLTKNQVSLTCLVKGFYPSDIA | |
| | VEWESNGQPENNYKTTPPVLKSDGSFFLYSKLTVDKSRWQQGNV | |
| | FSCSVMHEALHNHYTQKSLSLSPGK | |
| 364 | QVQLVQSGAEVKKPGSSVKVSCKASGYTFTSYWMNWVRQAPGQ | Muc17scfv- |
| | GLEWMGMIHPSDSETRLNQKFKDRVTITADKSTSTAYMELSSLRS | CD3scfv |
| | EDTAVYYCARQGIITSVQEFAYWGQGTLVTVSSGGGGSGGGGSG | |
| | GGGSGGGGSIQMTQSPSSLSASVGDRVTITCSASSSVNYIYWYQ | |
| | QKPGKAPKLLIYRTSNLASGVPSRFSGSGSGTDFTLTISSLQPEDF | |
| | ATYYCQQYHSYPLTFGGGTKVEIKSGGGSEVQLVESGGGLVQPG | |
| | GSLRLSCAASGFTFSTYAMNWVRQAPGKGLEWVGRIRSKYNNYA | |
| | TYYADSVKGRFTISRDDSKNTLYLQMNSLRAEDTAVYYCVRHGNF | |
| | GDSYVSWFEYWGQGTLVTVSSGKPGSGKPGSGKPGSGKPGSQA | |
| | VVTQEPSLTVSPGGTVTLTCGSSTGAVTTSNYANWVQQKPGKSP | |
| | RGLIGGTNKRAPGVPARFSGSLLGGKAALTISGAQPEDEADYYCA | |
| | LWYSNHWVFGGGTKLTVLEPKSSDKTHTCPPCPAPEFEGGPSVF | |
| | LFPPKPKDTLMISRTPEVTCVVVDVSHEDPEVKFNWYVDGVEVHN | |
| | AKTKPREEQYNSTYRVVSVLTVLHQDWLNGKEYKCKVSNKALPAS | |
| | IEKTISKAKGQPREPQVYTLPPCRKKLTKNQVSLTCLVKGFYPSDIA | |
| | VEWESNGQPENNYKTTPPVLKSDGSFFLYSKLTVDKSRWQQGNV | |
| | FSCSVMHEALHNHYTQKSLSLSPGK | |
| 365 | QVQLVQSGAEVKKPGSSVKVSCKASGYTFTSYWMNWVRQAPGQ | Muc17scfv- |
| | GLEWMGMIHPSDSETRLNQKFKDRVTITADKSTSTAYMELSSLRS | CD3scfv |
| | EDTAVYYCARQGIITSVQEFNYWGQGTLVTVSSGGGGSGGGGSG | |
| | GGGSGGGGSIQMTQSPSSLSASVGDRVTITCSASSSVNYIYWYQ | |
| | QKPGKAPKLLIYRTSNLASGVPSRFSGSGSGTDFTLTISSLQPEDF | |
| | ATYYCQQYHSYPLTFGGGTKVEIKSGGGSEVQLVESGGGLVQPG | |
| | GSLRLSCAASGFTFSTYAMNWVRQAPGKGLEWVGRIRSKYNNYA | |
| | TYYADSVKGRFTISRDDSKNTLYLQMNSLRAEDTAVYYCVRHGNF | |
| | GDSYVSWFAYWGQGTLVTVSSGKPGSGKPGSGKPGSGKPGSQA | |
| | VVTQEPSLTVSPGGTVTLTCGSSTGAVTTSNYANWVQQKPGKSP | |
| | RGLIGGTNKRAPGVPARFSGSLLGGKAALTISGAQPEDEADYYCA | |
| | LWYSNHWVFGGGTKLTVLEPKSSDKTHTCPPCPAPEFEGGPSVF | |
| | LFPPKPKDTLMISRTPEVTCVVVDVSHEDPEVKFNWYVDGVEVHN | |
| | AKTKPREEQYNSTYRVVSVLTVLHQDWLNGKEYKCKVSNKALPAS | |
| | IEKTISKAKGQPREPQVYTLPPCRKKLTKNQVSLTCLVKGFYPSDIA | |
| | VEWESNGQPENNYKTTPPVLKSDGSFFLYSKLTVDKSRWQQGNV | |
| | FSCSVMHEALHNHYTQKSLSLSPGK | |
| 366 | EVQLVQSGAEVKKPGESLKISCKGSGYEFSSHVVMNWVRQMPGK | Muc17scfv- |
| | GLEWMGQIYPGDGDINYNEKFRGQVTISADKSISTAYLQWSSLKA | Fc |
| | SDTAMYYCARHGNYVMDYWGQGTLVTVSSGKPGSGKPGSGKPG | |
| | SGKPGSIQLTQSPSFLSASVGDRVTITCSASSSVSYMFWYQQKPG | |
| | KAPKPWIYRTSNLASGVPSRFSGSGSGTEFTLTISSLQPEDFATYY | |
| | CQQFHDYPRTFGGGTKVEIKEPKSSDKTHTCPPCPAPEFEGGPSV | |
| | FLFPPKPKDTLMISRTPEVTCVVVDVSHEDPEVKFNWYVDGVEVH | |
| | NAKTKPREEQYNSTYRVVSVLTVLHQDWLNGKEYKCKVSNKALPA | |
| | SIEKTISKAKGQPREPQVYTLPPCRKKLTKNQVSLTCLVKGFYPSDI | |
| | AVEWESNGQPENNYKTTPPVLKSDGSFFLYSKLTVDKSRWQQGN | |
| | VFSCSVMHEALHNHYTQKSLSLSPGK | |
| 367 | QVQLVQSGAEVKKPGSSVKVSCKASGYTFTSYWMNWVRQAPGQ | Muc17scfv- |
| | GLEWMGMIHPSDSETRLNQKFKDRVTITADKSTSTAYMELSSLRS | Fc |
| | EDTAVYYCARQGIITSVQEFAYWGQGTLVTVSSGKPGSGKPGSGK | |
| | PGSGKPGSIQMTQSPSSLSASVGDRVTITCSASSSVNYIYWYQQK | |
| | PGKAPKLLIYRTSNLASGVPSRFSGSGSGTDFTLTISSLQPEDFATY | |
| | YCQQYHSYPLTFGGGTKVEIKEPKSSDKTHTCPPCPAPEFEGGPS | |
| | VFLFPPKPKDTLMISRTPEVTCVVVDVSHEDPEVKFNWYVDGVEV | |
| | HNAKTKPREEQYNSTYRVVSVLTVLHQDWLNGKEYKCKVSNKAL | |
| | PASIEKTISKAKGQPREPQVYTLPPCRKKLTKNQVSLTCLVKGFYP | |
| | SDIAVEWESNGQPENNYKTTPPVLKSDGSFFLYSKLTVDKSRWQQ | |
| | GNVFSCSVMHEALHNHYTQKSLSLSPGK | |
| 368 | EVQLVESGGGLVQPGGSLRLSCAASGFTFSSFGMHWVRQAPGK | HC; |
| | GLEWVSYISSGSSTIYYADTVKGRFTISRDNAKNSLYLQMNSLRAE | Muc17.7, |
| | DTAVYYCARWGYYGSSYFAYWGQGTLVTVSSASTKGPSVFPLAP | Muc17.21, |
| | SSKSTSGGTAALGCLVKDYFPEPVTVSWNSGALTSGVHTFPAVLQ | Muc17.22, |
| | SSGLYSLSSVVTVPSSSLGTQTYICNVNHKPSNTKVDKRVEPKSC | Muc17.23, |
| | DKTHTCPPCPAPEFEGGPSVFLFPPKPKDTLMISRTPEVTCVVVDV | Muc17.24 |
| | SHEDPEVKFNWYVDGVEVHNAKTKPREEQYNSTYRVVSVLTVLH | |
| | QDWLNGKEYKCKVSNKALPASIEKTISKAKGQPREPQVCTLPPSR | |
| | DELTKNQVSLTCLVEGFYPSDIAVEWESNGQPENNYKTTPPVLDS | |
| | DGSFFLYSDLTVDKSRWQQGNVFSCSVMHEALHNHYTQESLSLS | |
| | PGK | |
| 369 | EVQLVQSGAEVKKPGESLKISCKGSGYEFSSHVVMNWVRQMPGK | HC; |
| | GLEWMGQIYPGDGDINYNEKFRGQVTISADKSISTAYLQWSSLKA | Muc17.1, |
| | SDTAMYYCARHGNYVMDYWGQGTLVTVSSASTKGPSVFPLAPSS | Muc17.8, |
| | KSTSGGTAALGCLVKDYFPEPVTVSWNSGALTSGVHTFPAVLQSS | Muc17.9, |
| | GLYSLSSVVTVPSSSLGTQTYICNVNHKPSNTKVDKRVEPKSCDKT | Muc17.10, |
| | HTCPPCPAPEFEGGPSVFLFPPKPKDTLMISRTPEVTCVVVDVSHE | Muc17.11, |
| | DPEVKFNWYVDGVEVHNAKTKPREEQYNSTYRVVSVLTVLHQDW | Muc17.12, |
| | LNGKEYKCKVSNKALPASIEKTISKAKGQPREPQVCTLPPSRDELT | Muc17.13, |
| | KNQVSLTCLVEGFYPSDIAVEWESNGQPENNYKTTPPVLDSDGSF | Muc17.14 |
| | FLYSDLTVDKSRWQQGNVFSCSVMHEALHNHYTQESLSLSPGK | |
| 370 | QVQLVQSGAEVKKPGASVKVSCKASGYEFSSHVVMNWVRQAPGQ | HC; |
| | GLEWMGQIYPGDGDINYNEKFRGRVTMTRDTSTSTVYMELSSLRS | Muc17.29, |
| | EDTAVYYCARHGNYVMDYWGQGTLVTVSSASTKGPSVFPLAPSS | Muc17.30, |
| | KSTSGGTAALGCLVKDYFPEPVTVSWNSGALTSGVHTFPAVLQSS | Muc17.31 |
| | GLYSLSSVVTVPSSSLGTQTYICNVNHKPSNTKVDKRVEPKSCDKT | |
| | HTCPPCPAPEFEGGPSVFLFPPKPKDTLMISRTPEVTCVVVDVSHE | |
| | DPEVKFNWYVDGVEVHNAKTKPREEQYNSTYRVVSVLTVLHQDW | |
| | LNGKEYKCKVSNKALPASIEKTISKAKGQPREPQVCTLPPSRDELT | |
| | KNQVSLTCLVEGFYPSDIAVEWESNGQPENNYKTTPPVLDSDGSF | |
| | FLYSDLTVDKSRWQQGNVFSCSVMHEALHNHYTQESLSLSPGK | |
| 371 | QVQLVQSGAEVKKPGASVKVSCKASGYTFTSYWMNWVRQAPGQ | HC; |
| | GLEWIGMIHPSDSETRLNQKFKDRVTLTVDKSSSTAYMELSSLRSE | Muc17.45 |
| | DTAVYYCARQGIITSVQEFAYWGQGTLVTVSSASTKGPSVFPLAPS | |
| | SKSTSGGTAALGCLVKDYFPEPVTVSWNSGALTSGVHTFPAVLQS | |
| | SGLYSLSSVVTVPSSSLGTQTYICNVNHKPSNTKVDKRVEPKSCD | |
| | KTHTCPPCPAPEFEGGPSVFLFPPKPKDTLMISRTPEVTCVVVDVS | |
| | HEDPEVKFNWYVDGVEVHNAKTKPREEQYNSTYRVVSVLTVLHQ | |
| | DWLNGKEYKCKVSNKALPASIEKTISKAKGQPREPQVCTLPPSRD | |
| | ELTKNQVSLTCLVEGFYPSDIAVEWESNGQPENNYKTTPPVLDSD | |
| | GSFFLYSDLTVDKSRWQQGNVFSCSVMHEALHNHYTQESLSLSP | |
| | GK | |
| 372 | QVQLVQSGAEVKKPGASVKVSCKASGYTFTSYWMNWVRQAPGQ | HC; |
| | GLEWMGMIHPSDSETRLNQEFKDRVTMTRDTSTSTVYMELSSLR | Muc17.5, |
| | SEDTAVYYCARQGVITSVQEFAYWGQGTLVTVSSASTKGPSVFPL | Muc17.20 |
| | APSSKSTSGGTAALGCLVKDYFPEPVTVSWNSGALTSGVHTFPAV | |
| | LQSSGLYSLSSVVTVPSSSLGTQTYICNVNHKPSNTKVDKRVEPKS | |
| | CDKTHTCPPCPAPEFEGGPSVFLFPPKPKDTLMISRTPEVTCVVVD | |
| | VSHEDPEVKFNWYVDGVEVHNAKTKPREEQYNSTYRVVSVLTVL | |
| | HQDWLNGKEYKCKVSNKALPASIEKTISKAKGQPREPQVCTLPPS | |
| | RDELTKNQVSLTCLVEGFYPSDIAVEWESNGQPENNYKTTPPVLD | |
| | SDGSFFLYSDLTVDKSRWQQGNVFSCSVMHEALHNHYTQESLSL | |
| | SPGK | |
| 373 | QVQLVQSGAEVKKPGASVKVSCKASGYTFTSYWMNWVRQAPGQ | HC; |
| | GLEWMGMIHPSDSETRLNQKFKDRVTLTRDKSISTAYMELSRLRS | Muc17.37 |
| | DDTAVYYCARQGIITSVQEFAYWGQGTLVTVSSASTKGPSVFPLA | |
| | PSSKSTSGGTAALGCLVKDYFPEPVTVSWNSGALTSGVHTFPAVL | |
| | QSSGLYSLSSVVTVPSSSLGTQTYICNVNHKPSNTKVDKRVEPKS | |
| | CDKTHTCPPCPAPEFEGGPSVFLFPPKPKDTLMISRTPEVTCVVVD | |
| | VSHEDPEVKFNWYVDGVEVHNAKTKPREEQYNSTYRVVSVLTVL | |
| | HQDWLNGKEYKCKVSNKALPASIEKTISKAKGQPREPQVCTLPPS | |
| | RDELTKNQVSLTCLVEGFYPSDIAVEWESNGQPENNYKTTPPVLD | |
| | SDGSFFLYSDLTVDKSRWQQGNVFSCSVMHEALHNHYTQESLSL | |
| | SPGK | |
| 374 | QVQLVQSGAEVKKPGASVKVSCKASGYTFTSYWMNWVRQAPGQ | HC; |
| | GLEWMGMIHPSDSETRLNQKFKDRVTLTVDKSISTAYMELSRLRS | Muc17.35 |
| | DDTAVYYCARQGIITSVQEFAYWGQGTLVTVSSASTKGPSVFPLA | |
| | PSSKSTSGGTAALGCLVKDYFPEPVTVSWNSGALTSGVHTFPAVL | |
| | QSSGLYSLSSVVTVPSSSLGTQTYICNVNHKPSNTKVDKRVEPKS | |
| | CDKTHTCPPCPAPEFEGGPSVFLFPPKPKDTLMISRTPEVTCVVVD | |
| | VSHEDPEVKFNWYVDGVEVHNAKTKPREEQYNSTYRVVSVLTVL | |
| | HQDWLNGKEYKCKVSNKALPASIEKTISKAKGQPREPQVCTLPPS | |
| | RDELTKNQVSLTCLVEGFYPSDIAVEWESNGQPENNYKTTPPVLD | |
| | SDGSFFLYSDLTVDKSRWQQGNVFSCSVMHEALHNHYTQESLSL | |
| | SPGK | |
| 375 | QVQLVQSGAEVKKPGASVKVSCKASGYTFTSYWMNWVRQAPGQ | HC; |
| | GLEWMGMIHPSDSETRLNQKFKDRVTLTVDTSISTAYMELSRLRS | Muc17.36 |
| | DDTAVYYCARQGIITSVQEFAYWGQGTLVTVSSASTKGPSVFPLA | |
| | PSSKSTSGGTAALGCLVKDYFPEPVTVSWNSGALTSGVHTFPAVL | |
| | QSSGLYSLSSVVTVPSSSLGTQTYICNVNHKPSNTKVDKRVEPKS | |
| | CDKTHTCPPCPAPEFEGGPSVFLFPPKPKDTLMISRTPEVTCVVVD | |
| | VSHEDPEVKFNWYVDGVEVHNAKTKPREEQYNSTYRVVSVLTVL | |
| | HQDWLNGKEYKCKVSNKALPASIEKTISKAKGQPREPQVCTLPPS | |
| | RDELTKNQVSLTCLVEGFYPSDIAVEWESNGQPENNYKTTPPVLD | |
| | SDGSFFLYSDLTVDKSRWQQGNVFSCSVMHEALHNHYTQESLSL | |
| | SPGK | |
| 376 | QVQLVQSGAEVKKPGASVKVSCKASGYTFTSYWMNWVRQAPGQ | HC; |
| | GLEWMGMIHPSDSETRLNQKFKDRVTMTRDTSISTAYMELSRLRS | Muc17.232, |
| | DDTAVYYCARQGIITSVQEFAYWGQGTLVTVSSASTKGPSVFPLA | Muc17.33, |
| | PSSKSTSGGTAALGCLVKDYFPEPVTVSWNSGALTSGVHTFPAVL | Muc17.34 |
| | QSSGLYSLSSVVTVPSSSLGTQTYICNVNHKPSNTKVDKRVEPKS | |
| | CDKTHTCPPCPAPEFEGGPSVFLFPPKPKDTLMISRTPEVTCVVVD | |
| | VSHEDPEVKFNWYVDGVEVHNAKTKPREEQYNSTYRVVSVLTVL | |
| | HQDWLNGKEYKCKVSNKALPASIEKTISKAKGQPREPQVCTLPPS | |
| | RDELTKNQVSLTCLVEGFYPSDIAVEWESNGQPENNYKTTPPVLD | |
| | SDGSFFLYSDLTVDKSRWQQGNVFSCSVMHEALHNHYTQESLSL | |
| | SPGK | |
| 377 | QVQLVQSGAEVKKPGASVKVSCKASGYTFTSYWMNWVRQAPGQ | HC; |
| | GLEWMGMIHPSDSETRLNQKFKDRVTMTRDTSTSTVYMELSSLR | Muc17.31, |
| | SEDTAVYYCARQGIITSVQEFAYWGQGTLVTVSSASTKGPSVFPLA | Muc17.48, |
| | PSSKSTSGGTAALGCLVKDYFPEPVTVSWNSGALTSGVHTFPAVL | Muc17.49 |
| | QSSGLYSLSSVVTVPSSSLGTQTYICNVNHKPSNTKVDKRVEPKS | |
| | CDKTHTCPPCPAPEFEGGPSVFLFPPKPKDTLMISRTPEVTCVVVD | |
| | VSHEDPEVKFNWYVDGVEVHNAKTKPREEQYNSTYRVVSVLTVL | |
| | HQDWLNGKEYKCKVSNKALPASIEKTISKAKGQPREPQVCTLPPS | |
| | RDELTKNQVSLTCLVEGFYPSDIAVEWESNGQPENNYKTTPPVLD | |
| | SDGSFFLYSDLTVDKSRWQQGNVFSCSVMHEALHNHYTQESLSL | |
| | SPGK | |
| 378 | QVQLVQSGAEVKKPGASVKVSCKASGYTFTSYWMNWVRQAPGQ | HC; |
| | GLEWMGMIHPSDSETRLNQKFKDRVTMTVDKSISTAYMELSRLRS | Muc17.38 |
| | DDTAVYYCARQGIITSVQEFAYWGQGTLVTVSSASTKGPSVFPLA | |
| | PSSKSTSGGTAALGCLVKDYFPEPVTVSWNSGALTSGVHTFPAVL | |
| | QSSGLYSLSSVVTVPSSSLGTQTYICNVNHKPSNTKVDKRVEPKS | |
| | CDKTHTCPPCPAPEFEGGPSVFLFPPKPKDTLMISRTPEVTCVVVD | |
| | VSHEDPEVKFNWYVDGVEVHNAKTKPREEQYNSTYRVVSVLTVL | |
| | HQDWLNGKEYKCKVSNKALPASIEKTISKAKGQPREPQVCTLPPS | |
| | RDELTKNQVSLTCLVEGFYPSDIAVEWESNGQPENNYKTTPPVLD | |
| | SDGSFFLYSDLTVDKSRWQQGNVFSCSVMHEALHNHYTQESLSL | |
| | SPGK | |
| 379 | QVQLVQSGAEVKKPGSSVKVSCKASGYEFSSHVVMNWVRQAPGQ | HC |
| | GLEWMGQIYPGDGDINYNEKFRGRVTITADKSTSTAYMELSSLRS | Muc17.25, |
| | EDTAVYYCARHGNYVMDYWGQGTTVTVSSASTKGPSVFPLAPSS | Muc17.26, |
| | KSTSGGTAALGCLVKDYFPEPVTVSWNSGALTSGVHTFPAVLQSS | Muc17.27, |
| | GLYSLSSVVTVPSSSLGTQTYICNVNHKPSNTKVDKRVEPKSCDKT | Muc17.28 |
| | HTCPPCPAPEFEGGPSVFLFPPKPKDTLMISRTPEVTCVVVDVSHE | |
| | DPEVKFNWYVDGVEVHNAKTKPREEQYNSTYRVVSVLTVLHQDW | |
| | LNGKEYKCKVSNKALPASIEKTISKAKGQPREPQVCTLPPSRDELT | |
| | KNQVSLTCLVEGFYPSDIAVEWESNGQPENNYKTTPPVLDSDGSF | |
| | FLYSDLTVDKSRWQQGNVFSCSVMHEALHNHYTQESLSLSPGK | |
| 380 | QVQLVQSGAEVKKPGSSVKVSCKASGYTFTSYWMNWVRQAPGQ | HC; |
| | GLEWMGMIHPSDSETRLNQKFKDRVTITADKSTSTAYMELSSLRS | Muc17.4, |
| | EDTAVYYCARQGIITSVQEFAYWGQGTLVTVSSASTKGPSVFPLAP | Muc17.15, |
| | SSKSTSGGTAALGCLVKDYFPEPVTVSWNSGALTSGVHTFPAVLQ | Muc17.16, |
| | SSGLYSLSSVVTVPSSSLGTQTYICNVNHKPSNTKVDKRVEPKSC | Muc17.18, |
| | DKTHTCPPCPAPEFEGGPSVFLFPPKPKDTLMISRTPEVTCVVVDV | Muc17.19 |
| | SHEDPEVKFNWYVDGVEVHNAKTKPREEQYNSTYRVVSVLTVLH | |
| | QDWLNGKEYKCKVSNKALPASIEKTISKAKGQPREPQVCTLPPSR | |
| | DELTKNQVSLTCLVEGFYPSDIAVEWESNGQPENNYKTTPPVLDS | |
| | DGSFFLYSDLTVDKSRWQQGNVFSCSVMHEALHNHYTQESLSLS | |
| | PGK | |
| 381 | DIQMTQSPSSLSASVGDRVTITCKASEDIYNRLAWYQQKPGKAPKL | LC; |
| | LIYGATNLETGVPSRFSGSGSGKDYTLTISSLQPEDIATYYCQQFW | Muc17.23 |
| | RTPPTFGGGTKVEIKRTVAAPSVFIFPPSDEQLKSGTASVVCLLNN | |
| | FYPREAKVQWKVDNALQSGNSQESVTEQDSKDSTYSLSSTLTLSK | |
| | ADYEKHKVYACEVTHQGLSSPVTKSFNRGEC | |
| 382 | DIQMTQSPSSLSASVGDRVTITCKASEDIYNRLAWYQQKPGKAPKL | LC; |
| | LIYGATNLETGVPSRFSGSGSGTDFTFTISSLQPEDIATYYCQQFW | Muc17.24 |
| | RTPPTFGGGTKVEIKRTVAAPSVFIFPPSDEQLKSGTASVVCLLNN | |
| | FYPREAKVQWKVDNALQSGNSQESVTEQDSKDSTYSLSSTLTLSK | |
| | ADYEKHKVYACEVTHQGLSSPVTKSFNRGEC | |
| 383 | DIQMTQSPSSLSASVGDRVTITCKASEDIYNRLAWYQQKPGKAPK | LC; |
| | PLISGATNLETGVPSRFSGSGSGKDYTLTISSLQPEDIATYYCQQF | Muc17.21 |
| | WRTPPTFGGGTKVEIKRTVAAPSVFIFPPSDEQLKSGTASVVCLLN | |
| | NFYPREAKVQWKVDNALQSGNSQESVTEQDSKDSTYSLSSTLTLS | |
| | KADYEKHKVYACEVTHQGLSSPVTKSFNRGEC | |
| 384 | DIQMTQSPSSLSASVGDRVTITCKASEDIYNRLAWYQQKPGKAPK | LC; |
| | PLISGATNLETGVPSRFSGSGSGTDFTFTISSLQPEDIATYYCQQF | Muc17.7 |
| | WRTPPTFGGGTKVEIKRTVAAPSVFIFPPSDEQLKSGTASVVCLLN | |
| | NFYPREAKVQWKVDNALQSGNSQESVTEQDSKDSTYSLSSTLTLS | |
| | KADYEKHKVYACEVTHQGLSSPVTKSFNRGEC | |
| 385 | DIQMTQSPSSLSASVGDRVTITCKASEDIYNRLAWYQQKPGKAPK | LC; |
| | PLIYGATNLETGVPSRFSGSGSGTDFTFTISSLQPEDIATYYCQQF | Muc17.22 |
| | WRTPPTFGGGTKVEIKRTVAAPSVFIFPPSDEQLKSGTASVVCLLN | |
| | NFYPREAKVQWKVDNALQSGNSQESVTEQDSKDSTYSLSSTLTLS | |
| | KADYEKHKVYACEVTHQGLSSPVTKSFNRGEC | |
| 386 | EIVLTQSPATLSLSPGERATLSCSASSSVNYIYWYQQKPGQAPRLLI | LC; |
| | YRTSNLASGIPARFSGSGSGTDFTLTISSLEPEDFAVYYCQQYHSY | Muc17.16, |
| | PLTFGGGTKVEIKRTVAAPSVFIFPPSDEQLKSGTASVVCLLNNFYP | Muc17.17, |
| | REAKVQWKVDNALQSGNSQESVTEQDSKDSTYSLSSTLTLSKAD | Muc17.34, |
| | YEKHKVYACEVTHQGLSSPVTKSFNRGEC | Muc17.39, |
| | | Muc17.42, |
| | | Muc17.49 |
| 387 | EIVLTQSPATLSLSPGERATLSCSASSSVSYMFWYQQKPGQAPRL | LC; |
| | LIYRTSNLASGIPARFSGSGSGTDFTLTISSLEPEDFAVYYCQQFHD | Muc17.8, |
| | YPRTFGGGTKVEIKRTVAAPSVFIFPPSDEQLKSGTASVVCLLNNF | Muc17.27, |
| | YPREAKVQWKVDNALQSGNSQESVTEQDSKDSTYSLSSTLTLSKA | Muc17.31 |
| | DYEKHKVYACEVTHQGLSSPVTKSFNRGEC | |
| 388 | EIVLTQSPATLSLSPGERATLSCSASSSVSYMFWYQQKPGQAPRP | LC; |
| | WIYRTSNLASGIPPRFSGSGSGTDYTLTISSLEPEDFAVYYCQQFH | Muc17.28 |
| | DYPRTFGGGTKVEIKRTVAAPSVFIFPPSDEQLKSGTASVVCLLNN | |
| | FYPREAKVQWKVDNALQSGNSQESVTEQDSKDSTYSLSSTLTLSK | |
| | ADYEKHKVYACEVTHQGLSSPVTKSFNRGEC | |
| 389 | EIVLTQSPATLSVSPGERATLSCSASSSVNYIYWYQQKPGQAPRP | LC; |
| | WIYRTSNLASGIPARFSGSGSGTEYTLTISSLQSEDFAVYYCQQYH | Muc17.20 |
| | SYPLTFGGGTKVEIKRTVAAPSVFIFPPSDEQLKSGTASVVCLLNNF | |
| | YPREAKVQWKVDNALQSGNSQESVTEQDSKDSTYSLSSTLTLSKA | |
| | DYEKHKVYACEVTHQGLSSPVTKSFNRGEC | |
| 390 | EIVMTQSPATLSVSPGERATLSCSASSSVNYIYWYQQKPGQAPRL | LC; |
| | LIYRTSNLASGIPARFSGSGSGTEFTLTISSLQSEDFAVYYCQQYHS | Muc17.5, |
| | YPLTFGGGTKVEIKRTVAAPSVFIFPPSDEQLKSGTASVVCLLNNFY | Muc17.15, |
| | PREAKVQWKVDNALQSGNSQESVTEQDSKDSTYSLSSTLTLSKA | Muc17.33, |
| | DYEKHKVYACEVTHQGLSSPVTKSFNRGEC | Muc17.45, |
| | | Muc17.48 |
| 391 | EIVMTQSPATLSVSPGERATLSCSASSSVSYMFWYQQKPGQAPRL | LC; |
| | LIYRTSNLASGIPARFSGSGSGTEFTLTISSLQSEDFAVYYCQQFHD | Muc17.14, |
| | YPRTFGGGTKVEIKRTVAAPSVFIFPPSDEQLKSGTASVVCLLNNF | Muc17.26, |
| | YPREAKVQWKVDNALQSGNSQESVTEQDSKDSTYSLSSTLTLSKA | Muc17.30 |
| | DYEKHKVYACEVTHQGLSSPVTKSFNRGEC | |
| 392 | IQLTQSPSFLSASVGDRVTITCSASSSVSYMFWYQQKPGKAPKLLI | LC; |
| | YRTSNLASGVPPRFSGSGSGTEFTLTISSLQPEDFATYYCQQFHD | Muc17.13 |
| | YPRTFGGGTKVEIKRTVAAPSVFIFPPSDEQLKSGTASVVCLLNNF | |
| | YPREAKVQWKVDNALQSGNSQESVTEQDSKDSTYSLSSTLTLSKA | |
| | DYEKHKVYACEVTHQGLSSPVTKSFNRGEC | |
| 393 | IQLTQSPSFLSASVGDRVTITCSASSSVSYMFWYQQKPGKAPKLLI | LC; |
| | YRTSNLASGVPPRFSGSGSGTEYTLTISSLQPEDFATYYCQQFHD | Muc17.11 |
| | YPRTFGGGTKVEIKRTVAAPSVFIFPPSDEQLKSGTASVVCLLNNF | |
| | YPREAKVQWKVDNALQSGNSQESVTEQDSKDSTYSLSSTLTLSKA | |
| | DYEKHKVYACEVTHQGLSSPVTKSFNRGEC | |
| 394 | IQLTQSPSFLSASVGDRVTITCSASSSVSYMFWYQQKPGKAPKLLI | LC; |
| | YRTSNLASGVPSRFSGSGSGTEFTLTISSLQPEDFATYYCQQFHD | Muc17.9, |
| | YPRTFGGGTKVEIKRTVAAPSVFIFPPSDEQLKSGTASVVCLLNNF | Muc17.25, |
| | YPREAKVQWKVDNALQSGNSQESVTEQDSKDSTYSLSSTLTLSKA | Muc17.29 |
| | DYEKHKVYACEVTHQGLSSPVTKSFNRGEC | |
| 396 | IQLTQSPSFLSASVGDRVTITCSASSSVSYMFWYQQKPGKAPKLLI | LC; |
| | YRTSNLASGVPSRFSGSGSGTEYTLTISSLQPEDFATYYCQQFHD | Muc17.10 |
| | YPRTFGGGTKVEIKRTVAAPSVFIFPPSDEQLKSGTASVVCLLNNF | |
| | YPREAKVQWKVDNALQSGNSQESVTEQDSKDSTYSLSSTLTLSKA | |
| | DYEKHKVYACEVTHQGLSSPVTKSFNRGEC | |
| 397 | IQLTQSPSFLSASVGDRVTITCSASSSVSYMFWYQQKPGKAPKPW | LC; |
| | IYRTSNLASGVPPRFSGSGSGTEYTLTISSLQPEDFATYYCQQFHD | Muc17.12 |
| | YPRTFGGGTKVEIKRTVAAPSVFIFPPSDEQLKSGTASVVCLLNNF | |
| | YPREAKVQWKVDNALQSGNSQESVTEQDSKDSTYSLSSTLTLSKA | |
| | DYEKHKVYACEVTHQGLSSPVTKSFNRGEC | |
| 398 | IQLTQSPSFLSASVGDRVTITCSASSSVSYMFWYQQKPGKAPKPW | LC; |
| | IYRTSNLASGVPSRFSGSGSGTEFTLTISSLQPEDFATYYCQQFHD | Muc17.1 |
| | YPRTFGGGTKVEIKRTVAAPSVFIFPPSDEQLKSGTASVVCLLNNF | |
| | YPREAKVQWKVDNALQSGNSQESVTEQDSKDSTYSLSSTLTLSKA | |
| | DYEKHKVYACEVTHQGLSSPVTKSFNRGEC | |
| 399 | IQMTQSPSSLSASVGDRVTITCSASSSVNYIYWYQQKPGKAPKLLI | LC; |
| | YRTSNLASGVPSRFSGSGSGTDFTLTISSLQPEDFATYYCQQYHS | Muc17.4, |
| | YPLTFGGGTKVEIKRTVAAPSVFIFPPSDEQLKSGTASVVCLLNNFY | Muc17.31, |
| | PREAKVQWKVDNALQSGNSQESVTEQDSKDSTYSLSSTLTLSKA | Muc17.32, |
| | DYEKHKVYACEVTHQGLSSPVTKSFNRGEC | Muc17.35, |
| | | Muc17.36, |
| | | Muc17.387, |
| | | Muc17.38, |
| | | Muc17.40, |
| | | Muc17.43, |
| | | Muc17.47 |
| 400 | QAVVTQEPSLTVSPGGTVTLTCGSSTGAVTTSNYANWVQQKPGK | LC; CD3 |
| | SPRGLIGGTNKRAPGVPARFSGSLLGGKAALTISGAQPEDEADYY | |
| | CALWYSNHWVFGGGTKLTVLRTVAAPSVFIFPPSDEQLKSGTASV | |
| | VCLLNNFYPREAKVQWKVDNALQSGNSQESVTEQDSKDSTYSLS | |
| | STLTLSKADYEKHKVYACEVTHQGLSSPVTKSFNRGEC | |
| 401 | EVQLVESGGGLVQPGGSLRLSCAASGFTFSSFGMHWVRQAPGK | HC; |
| | GLEWVAYISSGNSAIYYADTVNGRFTISRDNPKNTLYLQMNSLRAE | CLDN182.12, |
| | DTAVYYCARLRYGNSFDYWGQGTLVTVSSASTKGPSVFPLAPSSK | CLND182.13 |
| | STSGGTAALGCLVKDYFPEPVTVSWNSGALTSGVHTFPAVLQSSG | |
| | LYSLSSVVTVPSSSLGTQTYICNVNHKPSNTKVDKRVEPKSCDKTH | |
| | TCPPCPAPEFEGGPSVFLFPPKPKDTLMISRTPEVTCVVVDVSHED | |
| | PEVKFNWYVDGVEVHNAKTKPREEQYNSTYRVVSVLTVLHQDWL | |
| | NGKEYKCKVSNKALPASIEKTISKAKGQPREPQVCTLPPSRDELTK | |
| | NQVSLTCLVEGFYPSDIAVEWESNGQPENNYKTTPPVLDSDGSFF | |
| | LYSDLTVDKSRWQQGNVFSCSVMHEALHNHYTQESLSLSPGK | |
| 402 | EVQLVESGGGLVQPGGSLRLSCAASGFTFSSFGMHWVRQAPGK | HC; |
| | GLEWVSYISSGNSAIYYADTVNGRFTISRDNAKNSLYLQMNSLRAE | CLDN182.3, |
| | DTAVYYCARLRYGNSFDYWGQGTLVTVSSASTKGPSVFPLAPSSK | CLDN182.7 |
| | STSGGTAALGCLVKDYFPEPVTVSWNSGALTSGVHTFPAVLQSSG | |
| | LYSLSSVVTVPSSSLGTQTYICNVNHKPSNTKVDKRVEPKSCDKTH | |
| | TCPPCPAPEFEGGPSVFLFPPKPKDTLMISRTPEVTCVVVDVSHED | |
| | PEVKFNWYVDGVEVHNAKTKPREEQYNSTYRVVSVLTVLHQDWL | |
| | NGKEYKCKVSNKALPASIEKTISKAKGQPREPQVCTLPPSRDELTK | |
| | NQVSLTCLVEGFYPSDIAVEWESNGQPENNYKTTPPVLDSDGSFF | |
| | LYSDLTVDKSRWQQGNVFSCSVMHEALHNHYTQESLSLSPGK | |
| 403 | QIQLVQSGAEVKKPGASVKVSCKASGYTFTNSGMNWVRQAPGQ | HC; |
| | GLEWMGWINTNTGEPTFAEEFRGRVTFTLDTSASTAYMELSRLRS | CLDN182.14 |
| | DDTAVYYCARYYYGNSFAYWGQGTLVTVSSASTKGPSVFPLAPS | |
| | SKSTSGGTAALGCLVKDYFPEPVTVSWNSGALTSGVHTFPAVLQS | |
| | SGLYSLSSVVTVPSSSLGTQTYICNVNHKPSNTKVDKRVEPKSCD | |
| | KTHTCPPCPAPEFEGGPSVFLFPPKPKDTLMISRTPEVTCVVVDVS | |
| | HEDPEVKFNWYVDGVEVHNAKTKPREEQYNSTYRVVSVLTVLHQ | |
| | DWLNGKEYKCKVSNKALPASIEKTISKAKGQPREPQVCTLPPSRD | |
| | ELTKNQVSLTCLVEGFYPSDIAVEWESNGQPENNYKTTPPVLDSD | |
| | GSFFLYSDLTVDKSRWQQGNVFSCSVMHEALHNHYTQESLSLSP | |
| | GK | |
| 404 | QVQLVQSGAEVKKPGASVKVSCKASGYTFTNFGITWVRQAPGQG | HC; |
| | LEWIGEIYPSSGNTFYNEKFKGRVTLTADKSSSAAYMELRSLRSDD | CLDN182.10, |
| | TAVYYCARGGGPLRSRYFDYWGQGTLVTVSSASTKGPSVFPLAP | CLND182.11 |
| | SSKSTSGGTAALGCLVKDYFPEPVTVSWNSGALTSGVHTFPAVLQ | |
| | SSGLYSLSSVVTVPSSSLGTQTYICNVNHKPSNTKVDKRVEPKSC | |
| | DKTHTCPPCPAPEFEGGPSVFLFPPKPKDTLMISRTPEVTCVVVDV | |
| | SHEDPEVKFNWYVDGVEVHNAKTKPREEQYNSTYRVVSVLTVLH | |
| | QDWLNGKEYKCKVSNKALPASIEKTISKAKGQPREPQVCTLPPSR | |
| | DELTKNQVSLTCLVEGFYPSDIAVEWESNGQPENNYKTTPPVLDS | |
| | DGSFFLYSDLTVDKSRWQQGNVFSCSVMHEALHNHYTQESLSLS | |
| | PGK | |
| 405 | QVQLVQSGAEVKKPGASVKVSCKASGYTFTNFGITWVRQAPGQG | HC; |
| | LEWMGEIYPSSGNTFYNEKFKGRVTMTTDTSTSTAYMELRSLRSD | CLDN182.4, |
| | DTAVYYCARGGGPLRSRYFDYWGQGTLVTVSSASTKGPSVFPLA | CLND182.8 |
| | PSSKSTSGGTAALGCLVKDYFPEPVTVSWNSGALTSGVHTFPAVL | |
| | QSSGLYSLSSVVTVPSSSLGTQTYICNVNHKPSNTKVDKRVEPKS | |
| | CDKTHTCPPCPAPEFEGGPSVFLFPPKPKDTLMISRTPEVTCVVVD | |
| | VSHEDPEVKFNWYVDGVEVHNAKTKPREEQYNSTYRVVSVLTVL | |
| | HQDWLNGKEYKCKVSNKALPASIEKTISKAKGQPREPQVCTLPPS | |
| | RDELTKNQVSLTCLVEGFYPSDIAVEWESNGQPENNYKTTPPVLD | |
| | SDGSFFLYSDLTVDKSRWQQGNVFSCSVMHEALHNHYTQESLSL | |
| | SPGK | |
| 406 | QVQLVQSGAEVKKPGASVKVSCKASGYTFTNSGMNWVRQAPGQ | HC; |
| | GLEWMGWINTNTGEPTFAEEFRGRVTMTRDTSISTAYMELSRLRS | CLND182.2, |
| | DDTAVYYCARYYYGNSFAYWGQGTLVTVSSASTKGPSVFPLAPS | CLND182.17 |
| | SKSTSGGTAALGCLVKDYFPEPVTVSWNSGALTSGVHTFPAVLQS | |
| | SGLYSLSSVVTVPSSSLGTQTYICNVNHKPSNTKVDKRVEPKSCD | |
| | KTHTCPPCPAPEFEGGPSVFLFPPKPKDTLMISRTPEVTCVVVDVS | |
| | HEDPEVKFNWYVDGVEVHNAKTKPREEQYNSTYRVVSVLTVLHQ | |
| | DWLNGKEYKCKVSNKALPASIEKTISKAKGQPREPQVCTLPPSRD | |
| | ELTKNQVSLTCLVEGFYPSDIAVEWESNGQPENNYKTTPPVLDSD | |
| | GSFFLYSDLTVDKSRWQQGNVFSCSVMHEALHNHYTQESLSLSP | |
| | GK | |
| 407 | QVQLVQSGAEVKKPGASVKVSCKASGYTFTNYGMNWVRQAPGQ | HC; |
| | GLEWMGWINTNTGEPTYAEEFKGRVTMTRDTSISTAYMELSRLRS | CLDN182.1 |
| | DDTAVYYCARYFYGNSFVYWGQGTLVTVSSASTKGPSVFPLAPSS | |
| | KSTSGGTAALGCLVKDYFPEPVTVSWNSGALTSGVHTFPAVLQSS | |
| | GLYSLSSVVTVPSSSLGTQTYICNVNHKPSNTKVDKRVEPKSCDKT | |
| | HTCPPCPAPEFEGGPSVFLFPPKPKDTLMISRTPEVTCVVVDVSHE | |
| | DPEVKFNWYVDGVEVHNAKTKPREEQYNSTYRVVSVLTVLHQDW | |
| | LNGKEYKCKVSNKALPASIEKTISKAKGQPREPQVCTLPPSRDELT | |
| | KNQVSLTCLVEGFYPSDIAVEWESNGQPENNYKTTPPVLDSDGSF | |
| | FLYSDLTVDKSRWQQGNVFSCSVMHEALHNHYTQESLSLSPGK | |
| 408 | QVQLVQSGAEVKKPGSSVKVSCKASGYAFNNYWMNWVRQAPGQ | HC; |
| | GLEWMGQISPGNGNSNFNGKFKGRVTITADKSTSTAYMELSSLRS | CLND182.5 |
| | EDTAVYYCARGGRYGNAMDYWGQGTTVTVSSASTKGPSVFPLAP | |
| | SSKSTSGGTAALGCLVKDYFPEPVTVSWNSGALTSGVHTFPAVLQ | |
| | SSGLYSLSSVVTVPSSSLGTQTYICNVNHKPSNTKVDKRVEPKSC | |
| | DKTHTCPPCPAPEFEGGPSVFLFPPKPKDTLMISRTPEVTCVVVDV | |
| | SHEDPEVKFNWYVDGVEVHNAKTKPREEQYNSTYRVVSVLTVLH | |
| | QDWLNGKEYKCKVSNKALPASIEKTISKAKGQPREPQVCTLPPSR | |
| | DELTKNQVSLTCLVEGFYPSDIAVEWESNGQPENNYKTTPPVLDS | |
| | DGSFFLYSDLTVDKSRWQQGNVFSCSVMHEALHNHYTQESLSLS | |
| | PGK | |
| 409 | QVQLVQSGAEVKKPGSSVKVSCKASGYAFSSYWMNWVRQAPGQ | HC; |
| | GLEWIGQIYPGNGNSNFNGKFKARVTLTADKSSSTAYMELSSLRS | CLND182.15, |
| | EDTAVYYCARGGRFGNAMDYWGQGTTVTVSSASTKGPSVFPLAP | CLND182.16 |
| | SSKSTSGGTAALGCLVKDYFPEPVTVSWNSGALTSGVHTFPAVLQ | |
| | SSGLYSLSSVVTVPSSSLGTQTYICNVNHKPSNTKVDKRVEPKSC | |
| | DKTHTCPPCPAPEFEGGPSVFLFPPKPKDTLMISRTPEVTCVVVDV | |
| | SHEDPEVKFNWYVDGVEVHNAKTKPREEQYNSTYRVVSVLTVLH | |
| | QDWLNGKEYKCKVSNKALPASIEKTISKAKGQPREPQVCTLPPSR | |
| | DELTKNQVSLTCLVEGFYPSDIAVEWESNGQPENNYKTTPPVLDS | |
| | DGSFFLYSDLTVDKSRWQQGNVFSCSVMHEALHNHYTQESLSLS | |
| | PGK | |
| 410 | QVQLVQSGAEVKKPGSSVKVSCKASGYAFSSYWMNWVRQAPGQ | HC; |
| | GLEWMGQIYPGNGNSNFNGKFKARVTITADKSTSTAYMELSSLRS | CLDN182.6, |
| | EDTAVYYCARGGRFGNAMDYWGQGTTVTVSSASTKGPSVFPLAP | CLDN 182.9 |
| | SSKSTSGGTAALGCLVKDYFPEPVTVSWNSGALTSGVHTFPAVLQ | |
| | SSGLYSLSSVVTVPSSSLGTQTYICNVNHKPSNTKVDKRVEPKSC | |
| | DKTHTCPPCPAPEFEGGPSVFLFPPKPKDTLMISRTPEVTCVVVDV | |
| | SHEDPEVKFNWYVDGVEVHNAKTKPREEQYNSTYRVVSVLTVLH | |
| | QDWLNGKEYKCKVSNKALPASIEKTISKAKGQPREPQVCTLPPSR | |
| | DELTKNQVSLTCLVEGFYPSDIAVEWESNGQPENNYKTTPPVLDS | |
| | DGSFFLYSDLTVDKSRWQQGNVFSCSVMHEALHNHYTQESLSLS | |
| | PGK | |
| 411 | DIVMTQSPDSLAVSLGERATINCKSSQSLLNSGNQKNYLTWYQQK | LC; |
| | PGQPPKLLIFWASTRESGVPDRFSGSGSGTDFTLTISSLQAEDVAV | CLND182.7, |
| | YYCQNNYYYPLTFGGGTKVEIKRTVAAPSVFIFPPSDEQLKSGTAS | CLND182.13 |
| | VVCLLNNFYPREAKVQWKVDNALQSGNSQESVTEQDSKDSTYSL | |
| | SSTLTLSKADYEKHKVYACEVTHQGLSSPVTKSFNRGEC | |
| 412 | DIVMTQSPDSLAVSLGERATINCKSSQSLLNSGNQKNYLTWYQQK | LC; |
| | PGQPPKLLIYWASTRESGVPDRFSGSGSGTDFTLTISSLQAEDVAV | CLDN182.6, |
| | YYCQNAYFYPYTFGGGTKVEIKRTVAAPSVFIFPPSDEQLKSGTAS | CLND182.15 |
| | VVCLLNNFYPREAKVQWKVDNALQSGNSQESVTEQDSKDSTYSL | |
| | SSTLTLSKADYEKHKVYACEVTHQGLSSPVTKSFNRGEC | |
| 413 | DIVMTQSPDSLAVSLGERATINCKSSQSLLNSGNQKNYLTWYQQK | LC; |
| | PGQPPKLLIYWASTRESGVPDRFSGSGSGTDFTLTISSLQAEDVAV | CLND182.2, |
| | YYCQNNYFYPLTFGGGTKVEIKRTVAAPSVFIFPPSDEQLKSGTAS | CLND182.14, |
| | VVCLLNNFYPREAKVQWKVDNALQSGNSQESVTEQDSKDSTYSL | CLND182.17 |
| | SSTLTLSKADYEKHKVYACEVTHQGLSSPVTKSFNRGEC | |
| 414 | DIVMTQSPDSLAVSLGERATINCKSSQSLLNSGNQKNYLTWYQQK | LC; |
| | PGQPPKLLIYWASTRESGVPDRFSGSGSGTDFTLTISSLQAEDVAV | CLND182.1 |
| | YYCQNNYNFPLTFGGGTKVEIKRTVAAPSVFIFPPSDEQLKSGTAS | |
| | VVCLLNNFYPREAKVQWKVDNALQSGNSQESVTEQDSKDSTYSL | |
| | SSTLTLSKADYEKHKVYACEVTHQGLSSPVTKSFNRGEC | |
| 415 | DIVMTQSPDSLAVSLGERATINCKSSQSLLNSGNQKNYLTWYQQK | LC; |
| | PGQPPKLLIYWASTRESGVPDRFSGSGSGTDFTLTISSLQAEDVAV | CLDN182.3, |
| | YYCQNNYYYPLTFGGGTKVEIKRTVAAPSVFIFPPSDEQLKSGTAS | CLND182.12 |
| | VVCLLNNFYPREAKVQWKVDNALQSGNSQESVTEQDSKDSTYSL | |
| | SSTLTLSKADYEKHKVYACEVTHQGLSSPVTKSFNRGEC | |
| 416 | DIVMTQSPDSLAVSLGERATINCKSSQSLLNSGNQRNYLTWYQQK | LC; |
| | PGQPPKLLIYWASTRESGVPDRFSGSGSGTDFTLTISSLQAEDVAV | CLND182.5 |
| | YYCQNAYFYPYTFGGGTKVEIKRTVAAPSVFIFPPSDEQLKSGTAS | |
| | VVCLLNNFYPREAKVQWKVDNALQSGNSQESVTEQDSKDSTYSL | |
| | SSTLTLSKADYEKHKVYACEVTHQGLSSPVTKSFNRGEC | |
| 417 | DIVMTQSPDSLAVSLGERATINCRSSQSLFSSGNQKNYLTWYQQK | LC; |
| | PGQPPKLLIYWASTRESGVPDRFSGSGSGADFTLTISSLQAEDVAV | CLDN182.8, |
| | YYCQNDYYYPLTFGGGTKVEIKRTVAAPSVFIFPPSDEQLKSGTAS | CLND182.11 |
| | VVCLLNNFYPREAKVQWKVDNALQSGNSQESVTEQDSKDSTYSL | |
| | SSTLTLSKADYEKHKVYACEVTHQGLSSPVTKSFNRGEC | |
| 418 | DIVMTQSPDSLAVSLGERATINCRSSQSLFSSGNQKNYLTWYQQK | LC; |
| | PGQPPKLLIYWASTRESGVPDRFSGSGSGTDFTLTISSLQAEDVAV | CLND812.4, |
| | YYCQNDYYYPLTFGGGTKVEIKRTVAAPSVFIFPPSDEQLKSGTAS | CLND182.10 |
| | VVCLLNNFYPREAKVQWKVDNALQSGNSQESVTEQDSKDSTYSL | |
| | SSTLTLSKADYEKHKVYACEVTHQGLSSPVTKSFNRGEC | |
| 419 | DIVMTQSPDSLAVSLGERATMNCKSSQSLLNSGNQKNYLTWYQQ | LC; |
| | KPGQPPKLLIYWASTRESGVPDRFSGSGSGTDFTLTISSLQAEDVA | CLND182.9, |
| | VYYCQNAYFYPYTFGGGTKVEIKRTVAAPSVFIFPPSDEQLKSGTA | CLND182.16 |
| | SVVCLLNNFYPREAKVQWKVDNALQSGNSQESVTEQDSKDSTYS | |
| | LSSTLTLSKADYEKHKVYACEVTHQGLSSPVTKSFNRGEC | |
| 420 | QVQLVQSGAEVKKPGASVKVSCKASGYTFTSYYIHWVRQAPGQG | VH; CD28 |
| | LEWIGCIYPGNVNTNYNEKFKDRATLTVDTSISTAYMELSRLRSDD | |
| | TAVYFCTRSHYGLDWNFDVWGQGTTVTVSS | |
| 421 | QVQLVQSGAEVKKPGASVKVSCKASGYTFTSYYIHWVRQAPGQG | VH; CD28 |
| | LEWIGSIYPGNVNTNYNEKFKDRATLTVDTSISTAYMELSRLRSDD | (C50S) |
| | TAVYFCTRSHYGLDWNFDVWGQGTTVTVSS | |
| 422 | QVQLVQSGAEVKKPGASVKVSCKASGYTFTSYYIHWVRQAPGQG | VH; CD28 |
| | LEWIGAIYPGNVNTNYNEKFKDRATLTVDTSISTAYMELSRLRSDD | (C50A) |
| | TAVYFCTRSHYGLDWNFDVWGQGTTVTVSS | |
| 423 | QVQLVQSGAEVKKPGASVKVSCKASGYTFTSYYIHWVRQAPGQG | VH; CD28 |
| | LEWIGGIYPGNVNTNYNEKFKDRATLTVDTSISTAYMELSRLRSDD | (C50G) |
| | TAVYFCTRSHYGLDWNFDVWGQGTTVTVSS | |
| 424 | DIQMTQSPSSLSASVGDRVTITCHASQNIYVWLNWYQQKPGKAPK | VL CD28 |
| | LLIYKASNLHTGVPSRFSGSGSGTDFTLTISSLQPEDFATYYCQQG | |
| | QTYPYTFGGGTKVEIK | |
| 425 | QVQLVQSGAEVKKPGASVKVSCKASGYTFTSYYIHWVRQAPGQG | HC; CD28 |
| | LEWIGCIYPGNVNTNYNEKFKDRATLTVDTSISTAYMELSRLRSDD | |
| | TAVYFCTRSHYGLDWNFDVWGQGTTVTVSSASTKGPSVFPLAPS | |
| | SKSTSGGTAALGCLVKDYFPEPVTVSWNSGALTSGVHTFPAVLQS | |
| | SGLYSLSSVVTVPSSSLGTQTYICNVNHKPSNTKVDKRVEPKSCD | |
| | KTHTCPPCPAPEFEGGPSVFLFPPKPKDTLMISRTPEVTCVVVDVS | |
| | HEDPEVKFNWYVDGVEVHNAKTKPREEQYNSTYRVVSVLTVLHQ | |
| | DWLNGKEYKCKVSNKALPASIEKTISKAKGQPREPQVCTLPPSRD | |
| | ELTKNQVSLTCLVEGFYPSDIAVEWESNGQPENNYKTTPPVLDSD | |
| | GSFFLYSDLTVDKSRWQQGNVFSCSVMHEALHNHYTQESLSLSP | |
| | GK | |
| 426 | DIQMTQSPSSLSASVGDRVTITCHASQNIYVWLNWYQQKPGKAPK | LC; 0D28 |
| | LLIYKASNLHTGVPSRFSGSGSGTDFTLTISSLQPEDFATYYCQQG | |
| | QTYPYTFGGGTKVEIKRTVAAPSVFIFPPSDEQLKSGTASVVCLLN | |
| | NFYPREAKVQWKVDNALQSGNSQESVTEQDSKDSTYSLSSTLTLS | |
| | KADYEKHKVYACEVTHQGLSSPVTKSFNRGEC | |
| 427 | QVQLVQSGAEVKKPGASVKVSCKASGYTFTSYYIHWVRQAPGQG | CD28 |
| | LEWIGCIYPGNVNTNYNEKFKDRATLTVDTSISTAYMELSRLRSDD | Scfv-Fc |
| | TAVYFCTRSHYGLDWNFDVWGQGTTVTVSSGKPGSGKPGSGKP | |
| | GSGKPGSDIQMTQSPSSLSASVGDRVTITCHASQNIYVWLNWYQ | |
| | QKPGKAPKLLIYKASNLHTGVPSRFSGSGSGTDFTLTISSLQPEDF | |
| | ATYYCQQGQTYPYTFGGGTKVEIKEPKSSDKTHTCPPCPAPEFEG | |
| | GPSVFLFPPKPKDTLMISRTPEVTCVVVDVSHEDPEVKFNWYVDG | |
| | VEVHNAKTKPREEQYNSTYRVVSVLTVLHQDWLNGKEYKCKVSN | |
| | KALPASIEKTISKAKGQPREPQVYTLPPCRKKLTKNQVSLTCLVKG | |
| | FYPSDIAVEWESNGQPENNYKTTPPVLKSDGSFFLYSKLTVDKSR | |
| | WQQGNVFSCSVMHEALHNHYTQKSLSLSPGK | |
| 428 | QVQLVQSGAEVKKPGASVKVSCKASGYTFTSYYIHWVRQAPGQG | CD28 |
| | LEWIGGIYPGNVNTNYNEKFKDRATLTVDTSISTAYMELSRLRSDD | (C50G) |
| | TAVYFCTRSHYGLDWNFDVWGQGTTVTVSSGKPGSGKPGSGKP | Scfv-Fc |
| | GSGKPGSDIQMTQSPSSLSASVGDRVTITCHASQNIYVWLNWYQ | |
| | QKPGKAPKLLIYKASNLHTGVPSRFSGSGSGTDFTLTISSLQPEDF | |
| | ATYYCQQGQTYPYTFGGGTKVEIKEPKSSDKTHTCPPCPAPEFEG | |
| | GPSVFLFPPKPKDTLMISRTPEVTCVVVDVSHEDPEVKFNWYVDG | |
| | VEVHNAKTKPREEQYNSTYRVVSVLTVLHQDWLNGKEYKCKVSN | |
| | KALPASIEKTISKAKGQPREPQVYTLPPCRKKLTKNQVSLTCLVKG | |
| | FYPSDIAVEWESNGQPENNYKTTPPVLKSDGSFFLYSKLTVDKSR | |
| | WQQGNVFSCSVMHEALHNHYTQKSLSLSPGK | |
| 429 | QVQLVQSGAEVKKPGASVKVSCKASGYTFTSYYIHWVRQAPGQG | CD28 |
| | LEWIGAIYPGNVNTNYNEKFKDRATLTVDTSISTAYMELSRLRSDD | (C50A) |
| | TAVYFCTRSHYGLDWNFDVWGQGTTVTVSSGKPGSGKPGSGKP | scfv-Fc |
| | GSGKPGSDIQMTQSPSSLSASVGDRVTITCHASQNIYVWLNWYQ | |
| | QKPGKAPKLLIYKASNLHTGVPSRFSGSGSGTDFTLTISSLQPEDF | |
| | ATYYCQQGQTYPYTFGGGTKVEIKEPKSSDKTHTCPPCPAPEFEG | |
| | GPSVFLFPPKPKDTLMISRTPEVTCVVVDVSHEDPEVKFNWYVDG | |
| | VEVHNAKTKPREEQYNSTYRVVSVLTVLHQDWLNGKEYKCKVSN | |
| | KALPASIEKTISKAKGQPREPQVYTLPPCRKKLTKNQVSLTCLVKG | |
| | FYPSDIAVEWESNGQPENNYKTTPPVLKSDGSFFLYSKLTVDKSR | |
| | WQQGNVFSCSVMHEALHNHYTQKSLSLSPGK | |
| 430 | QVQLVQSGAEVKKPGASVKVSCKASGYTFTSYYIHWVRQAPGQG | CD28 |
| | LEWIGSIYPGNVNTNYNEKFKDRATLTVDTSISTAYMELSRLRSDD | (C50S) |
| | TAVYFCTRSHYGLDWNFDVWGQGTTVTVSSGKPGSGKPGSGKP | scfv-Fc |
| | GSGKPGSDIQMTQSPSSLSASVGDRVTITCHASQNIYVWLNWYQ | |
| | QKPGKAPKLLIYKASNLHTGVPSRFSGSGSGTDFTLTISSLQPEDF | |
| | ATYYCQQGQTYPYTFGGGTKVEIKEPKSSDKTHTCPPCPAPEFEG | |
| | GPSVFLFPPKPKDTLMISRTPEVTCVVVDVSHEDPEVKFNWYVDG | |
| | VEVHNAKTKPREEQYNSTYRVVSVLTVLHQDWLNGKEYKCKVSN | |
| | KALPASIEKTISKAKGQPREPQVYTLPPCRKKLTKNQVSLTCLVKG | |
| | FYPSDIAVEWESNGQPENNYKTTPPVLKSDGSFFLYSKLTVDKSR | |
| | WQQGNVFSCSVMHEALHNHYTQKSLSLSPGK | |
| 431 | QVQLVQSGAEVKKPGASVKVSCKASDYTFSNYYIEWVRQAPGQG | DLL3scfv- |
| | LEWMGEILPGNGNTVYNEKFKDRVTMTVDTSTSTAYMELRSLRSD | Fc |
| | DTAVYYCARWGDYALFANWGQGTLVTVSSGGGGSGGGGSGGG | |
| | GSDIQMTQSPSTLSASVGDRVTITCKASQNVGTNVAWYQQKPGK | |
| | APKALIYSASYRYSGVPSRFSGSGSGTEFTLTISSLQPDDFATYYC | |
| | QQYNSYPFTFGQGTKLEIKEPKSSDKTHTCPPCPAPEFEGGPSVF | |
| | LFPPKPKDTLMISRTPEVTCVVVDVSHEDPEVKFNWYVDGVEVHN | |
| | AKTKPREEQYNSTYRVVSVLTVLHQDWLNGKEYKCKVSNKALPAS | |
| | IEKTISKAKGQPREPQVYTLPPCRKKLTKNQVSLTCLVKGFYPSDIA | |
| | VEWESNGQPENNYKTTPPVLKSDGSFFLYSKLTVDKSRWQQGNV | |
| | FSCSVMHEALHNHYTQKSLSLSPGK | |
| 432 | QVQLVQSGAEVKKPGASVKVSCKASGYTFTDYFMNWVRQAPGQ | DLL3scfv- |
| | GLEWMGVINPYNDITIYNQKFQGRVTMTVDRSTSTVYMELSSLRS | Fc |
| | EDTAVYYCAREGVLYDGYYEGAYWGQGTLVTVSSGGGGSGGGG | |
| | SGGGGSDIQLTQSPSFLSASVGDRVTITCKASQNVGIAVAWYQQK | |
| | PGKAPKLLIYAASNRYTGVPSRFSGSGSGTEFTLTISSLQPEDFAT | |
| | YYCQQYSTYPYTFGQGTKLEIKEPKSSDKTHTCPPCPAPEFEGGP | |
| | SVFLFPPKPKDTLMISRTPEVTCVVVDVSHEDPEVKFNWYVDGVE | |
| | VHNAKTKPREEQYNSTYRVVSVLTVLHQDWLNGKEYKCKVSNKA | |
| | LPASIEKTISKAKGQPREPQVYTLPPCRKKLTKNQVSLTCLVKGFY | |
| | PSDIAVEWESNGQPENNYKTTPPVLKSDGSFFLYSKLTVDKSRWQ | |
| | QGNVFSCSVMHEALHNHYTQKSLSLSPGK | |
| 433 | QVQLVQSGAEVKKPGASVKVSCKATDYIFSNYYIEWVRQAPGQGL | DLL3scfv- |
| | EWMGEILPGTGNTVYNEKFKDRVTMTVDTSTSTVYMELSSLRSED | Fc |
| | TAVYYCARWGDYALFANWGQGTLVTVSSGGGGSGGGGSGGGG | |
| | SDIQMTQSPSFLSASVGDRVTITCKASQNVGTNVAWYQQKPGKAP | |
| | KPLIYSTSYRYSGVPSRFSGSGSGTEFTLTISSLQPEDFATYYCQQ | |
| | YNNYPLTFGGGTKVEIKEPKSSDKTHTCPPCPAPEFEGGPSVFLFP | |
| | PKPKDTLMISRTPEVTCVVVDVSHEDPEVKFNWYVDGVEVHNAKT | |
| | KPREEQYNSTYRVVSVLTVLHQDWLNGKEYKCKVSNKALPASIEK | |
| | TISKAKGQPREPQVYTLPPCRKKLTKNQVSLTCLVKGFYPSDIAVE | |
| | WESNGQPENNYKTTPPVLKSDGSFFLYSKLTVDKSRWQQGNVFS | |
| | CSVMHEALHNHYTQKSLSLSPGK | |
| 434 | QVQLVQSGAEVKKPGASVKVSCKATDYIFSNYYIEWVRQAPGQGL | DLL3scfv- |
| | EWMGEILPGTGNTVYNEKFKDRVTMTVDTSTSTVYMELSSLRSED | Fc |
| | TAVYYCARWGDYALFANWGQGTLVTVSSGGGGSGGGGSGGGG | |
| | SDIQMTQSPSTLSASVGDRVTITCKASQNVGTNVAWYQQKPGKAP | |
| | KALIYSASYRYSGVPSRFSGSGSGTEFTLTISSLQPDDFATYYCQQ | |
| | YNSYPFTFGQGTKLEIKEPKSSDKTHTCPPCPAPEFEGGPSVFLFP | |
| | PKPKDTLMISRTPEVTCVVVDVSHEDPEVKFNWYVDGVEVHNAKT | |
| | KPREEQYNSTYRVVSVLTVLHQDWLNGKEYKCKVSNKALPASIEK | |
| | TISKAKGQPREPQVYTLPPCRKKLTKNQVSLTCLVKGFYPSDIAVE | |
| | WESNGQPENNYKTTPPVLKSDGSFFLYSKLTVDKSRWQQGNVFS | |
| | CSVMHEALHNHYTQKSLSLSPGK | |
| 435 | QVQLVQSGAEVKKPGASVKVSCKASGYTFTSYYIHWVRQAPGQC | CD28 |
| | LEWIGSIYPGNVNTNYNEKFKDRATLTVDTSISTAYMELSRLRSDD | (C50S) |
| | TAVYFCTRSHYGLDWNFDVWGQGTTVTVSSGKPGSGKPGSGKP | Scfv(CC)- |
| | GSGKPGSDIQMTQSPSSLSASVGDRVTITCHASQNIYVWLNWYQ | Fc |
| | QKPGKAPKLLIYKASNLHTGVPSRFSGSGSGTDFTLTISSLQPEDF | |
| | ATYYCQQGQTYPYTFGCGTKVEIKEPKSSDKTHTCPPCPAPEFEG | |
| | GPSVFLFPPKPKDTLMISRTPEVTCVVVDVSHEDPEVKFNWYVDG | |
| | VEVHNAKTKPREEQYNSTYRVVSVLTVLHQDWLNGKEYKCKVSN | |
| | KALPASIEKTISKAKGQPREPQVYTLPPCRKKLTKNQVSLTCLVKG | |
| | FYPSDIAVEWESNGQPENNYKTTPPVLKSDGSFFLYSKLTVDKSR | |
| | WQQGNVFSCSVMHEALHNHYTQKSLSLSPGK | |
| 436 | QVQLVQSGAEVKKPGASVKVSCKASGYTFTSYYIHWVRQAPGQG | CD28 |
| | LEWIGSIYPGNVNTNYNEKFKDRATLTVDTSISTAYMELSRLRSDD | (C50S) |
| | TAVYFCTRSHYGLDWNFDVWGQGTTVTVSSGGGGSGGGGSGG | Scfv(G4S)- |
| | GGSGGGGSDIQMTQSPSSLSASVGDRVTITCHASQNIYVWLNWY | Fc |
| | QQKPGKAPKLLIYKASNLHTGVPSRFSGSGSGTDFTLTISSLQPED | |
| | FATYYCQQGQTYPYTFGGGTKVEIKEPKSSDKTHTCPPCPAPEFE | |
| | GGPSVFLFPPKPKDTLMISRTPEVTCVVVDVSHEDPEVKFNWYVD | |
| | GVEVHNAKTKPREEQYNSTYRVVSVLTVLHQDWLNGKEYKCKVS | |
| | NKALPASIEKTISKAKGQPREPQVYTLPPCRKKLTKNQVSLTCLVK | |
| | GFYPSDIAVEWESNGQPENNYKTTPPVLKSDGSFFLYSKLTVDKS | |
| | RWQQGNVFSCSVMHEALHNHYTQKSLSLSPGK | |
| 437 | QVQLQQWGAGLLKPSETLSLTCAVYGGSFSGYYWSWIRQSPEKG | HC; |
| | LEWIGEINHGGYVTYNPSLESRVTISVDTSKNQFSLKLSSVTAADTA | CD137.U |
| | VYYCARDYGPGNYDWYFDLWGRGTLVTVSSASTKGPSVFPLAPS | |
| | SKSTSGGTAALGCLVKDYFPEPVTVSWNSGALTSGVHTFPAVLQS | |
| | SGLYSLSSVVTVPSSSLGTQTYICNVNHKPSNTKVDKRVEPKSCD | |
| | KTHTCPPCPAPEFEGGPSVFLFPPKPKDTLMISRTPEVTCVVVDVS | |
| | HEDPEVKFNWYVDGVEVHNAKTKPREEQYNSTYRVVSVLTVLHQ | |
| | DWLNGKEYKCKVSNKALPASIEKTISKAKGQPREPQVCTLPPSRD | |
| | ELTKNQVSLTCLVEGFYPSDIAVEWESNGQPENNYKTTPPVLDSD | |
| | GSFFLYSDLTVDKSRWQQGNVFSCSVMHEALHNHYTQESLSLSP | |
| | GK | |
| 438 | EIVLTQSPATLSLSPGERATLSCRASQSVSSYLAWYQQKPGQAPR | LC; |
| | LLIYDASNRATGIPARFSGSGSGTDFTLTISSLEPEDFAVYYCQQRS | CD137.U |
| | NWPPALTFGGGTKVEIKRTVAAPSVFIFPPSDEQLKSGTASVVCLL | |
| | NNFYPREAKVQWKVDNALQSGNSQESVTEQDSKDSTYSLSSTLT | |
| | LSKADYEKHKVYACEVTHQGLSSPVTKSFNRGEC | |
| 439 | QVQLVQSGAEVKKPGASVKVSCKASGYTFSSYWMHWVRQAPGQ | HC; |
| | RLEWMGEINPGNGHTNYSQKFQGRVTITVDKSASTAYMELSSLRS | CD137.B |
| | EDTAVYYCARSFTTARAFAYWGQGTLVTVSSASTKGPSVFPLAPS | |
| | SKSTSGGTAALGCLVKDYFPEPVTVSWNSGALTSGVHTFPAVLQS | |
| | SGLYSLSSVVTVPSSSLGTQTYICNVNHKPSNTKVDKRVEPKSCD | |
| | KTHTCPPCPAPEFEGGPSVFLFPPKPKDTLMISRTPEVTCVVVDVS | |
| | HEDPEVKFNWYVDGVEVHNAKTKPREEQYNSTYRVVSVLTVLHQ | |
| | DWLNGKEYKCKVSNKALPASIEKTISKAKGQPREPQVCTLPPSRD | |
| | ELTKNQVSLTCLVEGFYPSDIAVEWESNGQPENNYKTTPPVLDSD | |
| | GSFFLYSDLTVDKSRWQQGNVFSCSVMHEALHNHYTQESLSLSP | |
| | GK | |
| 440 | DIVMTQSPPTLSLSPGERVTLSCRASQSISDYLHWYQQKPGQSPR | LC; |
| | LLIKYASQSISGIPARFSGSGSGTDFTLTISSLEPEDFAVYYCQDGH | CD137.B |
| | SFPPTFGGGTKVEIKRTVAAPSVFIFPPSDEQLKSGTASVVCLLNN | |
| | FYPREAKVQWKVDNALQSGNSQESVTEQDSKDSTYSLSSTLTLSK | |
| | ADYEKHKVYACEVTHQGLSSPVTKSFNRGEC | |
| 441 | QVQLQQWGAGLLKPSETLSLTCAVYGGSFSGYYWSWIRQSPEKG | CD137.U |
| | LEWIGEINHGGYVTYNPSLESRVTISVDTSKNQFSLKLSSVTAADTA | scfv(CL)-Fc |
| | VYYCARDYGPGNYDWYFDLWGRGTLVTVSSGKPGSGKPGSGKP | |
| | GSGKPGSEIVLTQSPATLSLSPGERATLSCRASQSVSSYLAWYQQ | |
| | KPGQAPRLLIYDASNRATGIPARFSGSGSGTDFTLTISSLEPEDFAV | |
| | YYCQQRSNWPPALTFGGGTKVEIKEPKSSDKTHTCPPCPAPEFEG | |
| | GPSVFLFPPKPKDTLMISRTPEVTCVVVDVSHEDPEVKFNWYVDG | |
| | VEVHNAKTKPREEQYNSTYRVVSVLTVLHQDWLNGKEYKCKVSN | |
| | KALPASIEKTISKAKGQPREPQVYTLPPCRKKLTKNQVSLTCLVKG | |
| | FYPSDIAVEWESNGQPENNYKTTPPVLKSDGSFFLYSKLTVDKSR | |
| | WQQGNVFSCSVMHEALHNHYTQKSLSLSPGK | |
| 442 | QVQLQQWGAGLLKPSETLSLTCAVYGGSFSGYYWSWIRQSPEKG | CD137.U |
| | LEWIGEINHGGYVTYNPSLESRVTISVDTSKNQFSLKLSSVTAADTA | scfv(G4S)- |
| | VYYCARDYGPGNYDWYFDLWGRGTLVTVSSGGGGSGGGGSGG | Fc |
| | GGSEIVLTQSPATLSLSPGERATLSCRASQSVSSYLAWYQQKPGQ | |
| | APRLLIYDASNRATGIPARFSGSGSGTDFTLTISSLEPEDFAVYYCQ | |
| | QRSNWPPALTFGGGTKVEIKREPKSSDKTHTCPPCPAPEFEGGPS | |
| | VFLFPPKPKDTLMISRTPEVTCVVVDVSHEDPEVKFNWYVDGVEV | |
| | HNAKTKPREEQYNSTYRVVSVLTVLHQDWLNGKEYKCKVSNKAL | |
| | PASIEKTISKAKGQPREPQVYTLPPCRKKLTKNQVSLTCLVKGFYP | |
| | SDIAVEWESNGQPENNYKTTPPVLKSDGSFFLYSKLTVDKSRWQQ | |
| | GNVFSCSVMHEALHNHYTQKSLSLSPGK | |
| 443 | QVQLQQWGAGLLKPSETLSLTCAVYGGSFSGYYWSWIRQSPEKG | CD137.U |
| | LEWIGEINHGGYVTYNPSLESRVTISVDTSKNQFSLKLSSVTAADTA | scfv (6x)-Fc |
| | VYYCARDYGPGNYDWYFDLWGRGTLVTVSSGGGGSGGGGSGG | |
| | GGSGGGGSGGGGSGGGGSEIVLTQSPATLSLSPGERATLSCRAS | |
| | QSVSSYLAWYQQKPGQAPRLLIYDASNRATGIPARFSGSGSGTDF | |
| | TLTISSLEPEDFAVYYCQQRSNWPPALTFGGGTKVEIKEPKSSDKT | |
| | HTCPPCPAPEFEGGPSVFLFPPKPKDTLMISRTPEVTCVVVDVSHE | |
| | DPEVKFNWYVDGVEVHNAKTKPREEQYNSTYRVVSVLTVLHQDW | |
| | LNGKEYKCKVSNKALPASIEKTISKAKGQPREPQVYTLPPCRKKLT | |
| | KNQVSLTCLVKGFYPSDIAVEWESNGQPENNYKTTPPVLKSDGSF | |
| | FLYSKLTVDKSRWQQGNVFSCSVMHEALHNHYTQKSLSLSPGK | |
| 444 | EIVLTQSPATLSLSPGERATLSCRASQSVSSYLAWYQQKPGQAPR | CD137.U |
| | LLIYDASNRATGIPARFSGSGSGTDFTLTISSLEPEDFAVYYCQQRS | scfv(VLVH) |
| | NWPPALTFGGGTKVEIKGKPGSGKPGSGKPGSGKPGSQVQLQQ | Fc |
| | WGAGLLKPSETLSLTCAVYGGSFSGYYWSWIRQSPEKGLEWIGEI | |
| | NHGGYVTYNPSLESRVTISVDTSKNQFSLKLSSVTAADTAVYYCAR | |
| | DYGPGNYDWYFDLWGRGTLVTVSSEPKSSDKTHTCPPCPAPEFE | |
| | GGPSVFLFPPKPKDTLMISRTPEVTCVVVDVSHEDPEVKFNWYVD | |
| | GVEVHNAKTKPREEQYNSTYRVVSVLTVLHQDWLNGKEYKCKVS | |
| | NKALPASIEKTISKAKGQPREPQVYTLPPCRKKLTKNQVSLTCLVK | |
| | GFYPSDIAVEWESNGQPENNYKTTPPVLKSDGSFFLYSKLTVDKS | |
| | RWQQGNVFSCSVMHEALHNHYTQKSLSLSPGK | |
| 445 | QVQLQQWGAGLLKPSETLSLTCAVYGGSFSGYYWSWIRQSPEKG | CD137.U |
| | LEWIGEINHGGYVTYNPSLESRVTISVDTSKNQFSLKLSSVTAADTA | (G99S) |
| | VYYCARDYGPGNYDWYFDLWGRGTLVTVSSGGGGSGGGGSGG | scfv-Fc |
| | GGSEIVLTQSPATLSLSPGERATLSCRASQSVSSYLAWYQQKPGQ | |
| | APRLLIYDASNRATGIPARFSGSGSGTDFTLTISSLEPEDFAVYYCQ | |
| | QRSNWPPALTFSGGTKVEIKREPKSSDKTHTCPPCPAPEFEGGPS | |
| | VFLFPPKPKDTLMISRTPEVTCVVVDVSHEDPEVKFNWYVDGVEV | |
| | HNAKTKPREEQYNSTYRVVSVLTVLHQDWLNGKEYKCKVSNKAL | |
| | PASIEKTISKAKGQPREPQVYTLPPCRKKLTKNQVSLTCLVKGFYP | |
| | SDIAVEWESNGQPENNYKTTPPVLKSDGSFFLYSKLTVDKSRWQQ | |
| | GNVFSCSVMHEALHNHYTQKSLSLSPGK | |
| 446 | QVQLQESGPGLVKPSETLSLTCTVSGGSFSGYYWSWIRQPPGKG | CD137.Uv1 |
| | LEWIGEINHGGYVTYNPSLESRVTISVDTSKNQFSLKLSSVTAADTA | scfv-Fc |
| | VYYCARDYGPGNYDWYFDLWGRGTLVTVSSGKPGSGKPGSGKP | |
| | GSGKPGSEIVLTQSPGTLSLSPGERATLSCRASQSVSSSYLAWYQ | |
| | QKPGQAPRLLIYDASNRATGIPDRFSGSGSGTDFTLTISRLEPEDF | |
| | AVYYCQQRSNWPPALTFGGGTKVEIKEPKSSDKTHTCPPCPAPEF | |
| | EGGPSVFLFPPKPKDTLMISRTPEVTCVVVDVSHEDPEVKFNWYV | |
| | DGVEVHNAKTKPREEQYNSTYRVVSVLTVLHQDWLNGKEYKCKV | |
| | SNKALPASIEKTISKAKGQPREPQVYTLPPCRKKLTKNQVSLTCLV | |
| | KGFYPSDIAVEWESNGQPENNYKTTPPVLKSDGSFFLYSKLTVDK | |
| | SRWQQGNVFSCSVMHEALHNHYTQKSLSLSPGK | |
| 447 | EVQLLESGGGLVQPGGSLRLSCAASGGSFSGYYWSWVRQAPGK | CD137.Uv2 |
| | GLEWVSEINHGGYVTYNPSLESRFTISRDNSKNTLYLQMNSLRAE | scfv-Fc |
| | DTAVYYCAKDYGPGNYDWYFDLWGRGTLVTVSSGKPGSGKPGS | |
| | GKPGSGKPGSEIVLTQSPGTLSLSPGERATLSCRASQSVSSSYLA | |
| | WYQQKPGQAPRLLIYDASNRATGIPDRFSGSGSGTDFTLTISRLEP | |
| | EDFAVYYCQQRSNWPPALTFGGGTKVEIKEPKSSDKTHTCPPCPA | |
| | PEFEGGPSVFLFPPKPKDTLMISRTPEVTCVVVDVSHEDPEVKFN | |
| | WYVDGVEVHNAKTKPREEQYNSTYRVVSVLTVLHQDWLNGKEYK | |
| | CKVSNKALPASIEKTISKAKGQPREPQVYTLPPCRKKLTKNQVSLT | |
| | CLVKGFYPSDIAVEWESNGQPENNYKTTPPVLKSDGSFFLYSKLT | |
| | VDKSRWQQGNVFSCSVMHEALHNHYTQKSLSLSPGK | |
| 448 | QVQLVQSGAEVKKPGSSVKVSCKASGGSFSGYYWSWVRQAPGQ | CD137.Uv3 |
| | GLEWMGEINHGGYVTYNPSLESRVTITADESTSTAYMELSSLRSE | scfv-Fc |
| | DTAVYYCARDYGPGNYDWYFDLWGRGTLVTVSSGKPGSGKPGS | |
| | GKPGSGKPGSEIVLTQSPGTLSLSPGERATLSCRASQSVSSSYLA | |
| | WVYQQKPGQAPRLLIYDASNRATGIPDRFSGSGSGTDFTLTISRLEP | |
| | EDFAVYYCQQRSNWPPALTFGGGTKVEIKEPKSSDKTHTCPPCPA | |
| | PEFEGGPSVFLFPPKPKDTLMISRTPEVTCVVVDVSHEDPEVKFN | |
| | WYVDGVEVHNAKTKPREEQYNSTYRVVSVLTVLHQDWLNGKEYK | |
| | CKVSNKALPASIEKTISKAKGQPREPQVYTLPPCRKKLTKNQVSLT | |
| | CLVKGFYPSDIAVEWESNGQPENNYKTTPPVLKSDGSFFLYSKLT | |
| | VDKSRWQQGNVFSCSVMHEALHNHYTQKSLSLSPGK | |
| 449 | QVQLQQWGAGLLKPSETLSLTCAVYGGSFSGYYWSWIRQSPEKC | CD137 |
| | LEWIGEINHGGYVTYNPSLESRVTISVDTSKNQFSLKLSSVTAADTA | |
| | VYYCARDYGPGNYDWYFDLWGRGTLVTVSSGKPGSGKPGSGKP | |
| | GSGKPGSEIVLTQSPATLSLSPGERATLSCRASQSVSSYLAWYQQ | |
| | KPGQAPRLLIYDASNRATGIPARFSGSGSGTDFTLTISSLEPEDFAV | |
| | YYCQQRSNWPPALTFGCGTKVEIKEPKSSDKTHTCPPCPAPEFEG | |
| | GPSVFLFPPKPKDTLMISRTPEVTCVVVDVSHEDPEVKFNWYVDG | |
| | VEVHNAKTKPREEQYNSTYRVVSVLTVLHQDWLNGKEYKCKVSN | |
| | KALPASIEKTISKAKGQPREPQVYTLPPCRKKLTKNQVSLTCLVKG | |
| | FYPSDIAVEWESNGQPENNYKTTPPVLKSDGSFFLYSKLTVDKSR | |
| | WQQGNVFSCSVMHEALHNHYTQKSLSLSPGK | |
| 450 | QVQLQQWGAGLLKPSETLSLTCAVYGGSFSGYYWSWIRQSPEKC | CD137.U |
| | LEWIGEINHGGYVTYNPSLESRVTISVDTSKNQFSLKLSSVTAADTA | scfv(CC)-Fc |
| | VYYCARDYGPGNYDVVYFDLWGRGTLVTVSSGKPGSGKPGSGKP | |
| | GSGKPGSEIVLTQSPATLSLSPGERATLSCRASQSVSSYLAWYQQ | |
| | KPGQAPRLLIYDASNRATGIPARFSGSGSGTDFTLTISSLEPEDFAV | |
| | YYCQQRSNWPPALTFGCGTKVEIKEPKSSDKTHTCPPCPAPEFEG | |
| | GPSVFLFPPKPKDTLMISRTPEVTCVVVDVSHEDPEVKFNWYVDG | |
| | VEVHNAKTKPREEQYNSTYRVVSVLTVLHQDWLNGKEYKCKVSN | |
| | KALPASIEKTISKAKGQPREPQVYTLPPCRKKLTKNQVSLTCLVKG | |
| | FYPSDIAVEWESNGQPENNYKTTPPVLKSDGSFFLYSKLTVDKSR | |
| | WQQGNVFSCSVMHEALHNHYTQKSLSLSPGK | |
| 451 | QVQLVQSGAEVKKPGASVKVSCKASGYTFSSYWMHWVRQAPGQ | CD137.B |
| | RLEWMGEINPGNGHTNYSQKFQGRVTITVDKSASTAYMELSSLRS | scfv-Fc |
| | EDTAVYYCARSFTTARAFAYWGQGTLVTVSSGKPGSGKPGSGKP | |
| | GSGKPGSDIVMTQSPPTLSLSPGERVTLSCRASQSISDYLHWYQQ | |
| | KPGQSPRLLIKYASQSISGIPARFSGSGSGTDFTLTISSLEPEDFAV | |
| | YYCQDGHSFPPTFGGGTKVEIKEPKSSDKTHTCPPCPAPEFEGGP | |
| | SVFLFPPKPKDTLMISRTPEVTCVVVDVSHEDPEVKFNWYVDGVE | |
| | VHNAKTKPREEQYNSTYRVVSVLTVLHQDWLNGKEYKCKVSNKA | |
| | LPASIEKTISKAKGQPREPQVYTLPPCRKKLTKNQVSLTCLVKGFY | |
| | PSDIAVEWESNGQPENNYKTTPPVLKSDGSFFLYSKLTVDKSRWQ | |
| | QGNVFSCSVMHEALHNHYTQKSLSLSPGK | |
| 452 | QVQLVQSGAEVKKPGASVKVSCKASGYTFSSYWMHWVRQAPGQ | CD137.b |
| | RLEWMGEINPGNGHTNYAQKFQGRVTITVDKSASTAYMELSSLRS | (S60A) |
| | EDTAVYYCARSFTTARAFAYWGQGTLVTVSSGKPGSGKPGSGKP | scfv-fc |
| | GSGKPGSDIVMTQSPPTLSLSPGERVTLSCRASQSISDYLHWYQQ | |
| | KPGQSPRLLIKYASQSISGIPARFSGSGSGTDFTLTISSLEPEDFAV | |
| | YYCQDGHSFPPTFGGGTKVEIKEPKSSDKTHTCPPCPAPEFEGGP | |
| | SVFLFPPKPKDTLMISRTPEVTCVVVDVSHEDPEVKFNWYVDGVE | |
| | VHNAKTKPREEQYNSTYRVVSVLTVLHQDWLNGKEYKCKVSNKA | |
| | LPASIEKTISKAKGQPREPQVYTLPPCRKKLTKNQVSLTCLVKGFY | |
| | PSDIAVEWESNGQPENNYKTTPPVLKSDGSFFLYSKLTVDKSRWQ | |
| | QGNVFSCSVMHEALHNHYTQKSLSLSPGK | |
| 453 | QVQLVQSGAEVKKPGASVKVSCKASGYTFSSYWMHWVRQAPGQ | CD137.B |
| | RLEWMGEINPGNGHTNYNQKFQGRVTITVDKSASTAYMELSSLRS | (S50N) |
| | EDTAVYYCARSFTTARAFAYWGQGTLVTVSSGKPGSGKPGSGKP | scfv-fc |
| | GSGKPGSDIVMTQSPPTLSLSPGERVTLSCRASQSISDYLHWYQQ | |
| | KPGQSPRLLIKYASQSISGIPARFSGSGSGTDFTLTISSLEPEDFAV | |
| | YYCQDGHSFPPTFGGGTKVEIKEPKSSDKTHTCPPCPAPEFEGGP | |
| | SVFLFPPKPKDTLMISRTPEVTCVVVDVSHEDPEVKFNWYVDGVE | |
| | VHNAKTKPREEQYNSTYRVVSVLTVLHQDWLNGKEYKCKVSNKA | |
| | LPASIEKTISKAKGQPREPQVYTLPPCRKKLTKNQVSLTCLVKGFY | |
| | PSDIAVEWESNGQPENNYKTTPPVLKSDGSFFLYSKLTVDKSRWQ | |
| | QGNVFSCSVMHEALHNHYTQKSLSLSPGK | |
| 454 | EVQLVESGGGLVQPGGSLRLSCAASGFTFSDYVVMSWVRQAPGK | CD137.39 |
| | GLEWVADIKNDGSYTNYAPSLTNRFTISRDNAKNSLYLQMNSLRA | scfv-Fc |
| | EDTAVYYCARELTGTWGQGTMVTVSSGKPGSGKPGSGKPGSGK | |
| | PGSDIVMTQSPDSLAVSLGERATINCKSSQSLLSSGNQKNYLAWY | |
| | QQKPGQPPKLLIYYASTRQSGVPDRFSGSGSGTDFTLTISSLQAED | |
| | VAVYYCLQYDRYPFTFGQGTKLEIKEPKSSDKTHTCPPCPAPEFE | |
| | GGPSVFLFPPKPKDTLMISRTPEVTCVVVDVSHEDPEVKFNWYVD | |
| | GVEVHNAKTKPREEQYNSTYRVVSVLTVLHQDWLNGKEYKCKVS | |
| | NKALPASIEKTISKAKGQPREPQVYTLPPCRKKLTKNQVSLTCLVK | |
| | GFYPSDIAVEWESNGQPENNYKTTPPVLKSDGSFFLYSKLTVDKS | |
| | RWQQGNVFSCSVMHEALHNHYTQKSLSLSPGK | |
| 455 | EVQLVESGGGLVQPGGSLRLSCAASGFTFSDYVVMSWVRQAPGK | CD137.39v1 |
| | GLEWVADIKNDGSYTNYVDSVKGRFTISRDNAKNSLYLQMNSLRA | scfv-Fc |
| | EDTAVYYCARELTGTWGQGTLVTVSSGKPGSGKPGSGKPGSGKP | |
| | GSDIIMTQSPDSLAVSLGERATINCKSSQSLLSSGNQKNYLAWYQ | |
| | QKPGQPPELLIYYASTRQSGVPDRFSGSGSGTDFTLTISSLQAEDV | |
| | AVYYCLQYDRYPFTFGQGTKLEIKEPKSSDKTHTCPPCPAPEFEG | |
| | GPSVFLFPPKPKDTLMISRTPEVTCVVVDVSHEDPEVKFNWYVDG | |
| | VEVHNAKTKPREEQYNSTYRVVSVLTVLHQDWLNGKEYKCKVSN | |
| | KALPASIEKTISKAKGQPREPQVYTLPPCRKKLTKNQVSLTCLVKG | |
| | FYPSDIAVEWESNGQPENNYKTTPPVLKSDGSFFLYSKLTVDKSR | |
| | WQQGNVFSCSVMHEALHNHYTQKSLSLSPGK | |
| 456 | EVQLVESGGGLVQPGGSLRLSCAASGFTFSDYVVMSWVRQAPGK | CD137.39v2 |
| | GLEWVADIKNDGSYTNYVDSVKGRFTISRDNAKNSLYLQMNSLRA | scfv-Fc |
| | EDTAVYYCARELTGTWGQGTLVTVSSGKPGSGKPGSGKPGSGKP | |
| | GSDIVMTQSPDSLAVSLGERATINCKSSQSLLSSGNQKNYLAWYQ | |
| | QKPGQPPKLLIYYASTRQSGVPDRFSGSGSGTDFTLTISSLQAEDV | |
| | AVYYCLQYDRYPFTFGQGTKLEIKEPKSSDKTHTCPPCPAPEFEG | |
| | GPSVFLFPPKPKDTLMISRTPEVTCVVVDVSHEDPEVKFNWYVDG | |
| | VEVHNAKTKPREEQYNSTYRVVSVLTVLHQDWLNGKEYKCKVSN | |
| | KALPASIEKTISKAKGQPREPQVYTLPPCRKKLTKNQVSLTCLVKG | |
| | FYPSDIAVEWESNGQPENNYKTTPPVLKSDGSFFLYSKLTVDKSR | |
| | WQQGNVFSCSVMHEALHNHYTQKSLSLSPGK | |
| 457 | EVQLVESGGGLVQPGGSLRLSCAASGFTFSDYWMSWVRQAPGK | CD137.39v3 |
| | GMEWVGDIKNDGSYTNYAPSLTNRFTISRDNARNSLYLQMNSLRA | scfv-Fc |
| | EDTAVYYCTRELTGTWGQGTLVTVSSGKPGSGKPGSGKPGSGKP | |
| | GSDIIMTQSPDSLAVSLGERATINCKSSQSLLSSGNQKNYLAWYQ | |
| | QKPGQPPELLIYYASTRQSGVPDRFSGSGSGTDFTLTISSLQAEDV | |
| | AVYYCLQYDRYPFTFGQGTKLEIKEPKSSDKTHTCPPCPAPEFEG | |
| | GPSVFLFPPKPKDTLMISRTPEVTCVVVDVSHEDPEVKFNWYVDG | |
| | VEVHNAKTKPREEQYNSTYRVVSVLTVLHQDWLNGKEYKCKVSN | |
| | KALPASIEKTISKAKGQPREPQVYTLPPCRKKLTKNQVSLTCLVKG | |
| | FYPSDIAVEWESNGQPENNYKTTPPVLKSDGSFFLYSKLTVDKSR | |
| | WQQGNVFSCSVMHEALHNHYTQKSLSLSPGK | |
| 458 | EVQLVESGGGLVQPGGSLRLSCAASGFTFSDYWMSWVRQAPGK | CD137.39V4 |
| | GMEWVGDIKNDGSYTNYAPSLTNRFTISRDNARNSLYLQMNSLRA | scfv-Fc |
| | EDTAVYYCTRELTGTWGQGTLVTVSSGKPGSGKPGSGKPGSGKP | |
| | GSDIVMTQSPDSLAVSLGERATINCKSSQSLLSSGNQKNYLAWYQ | |
| | QKPGQPPKLLIYYASTRQSGVPDRFSGSGSGTDFTLTISSLQAEDV | |
| | AVYYCLQYDRYPFTFGQGTKLEIKEPKSSDKTHTCPPCPAPEFEG | |
| | GPSVFLFPPKPKDTLMISRTPEVTCVVVDVSHEDPEVKFNWYVDG | |
| | VEVHNAKTKPREEQYNSTYRVVSVLTVLHQDWLNGKEYKCKVSN | |
| | KALPASIEKTISKAKGQPREPQVYTLPPCRKKLTKNQVSLTCLVKG | |
| | FYPSDIAVEWESNGQPENNYKTTPPVLKSDGSFFLYSKLTVDKSR | |
| | WQQGNVFSCSVMHEALHNHYTQKSLSLSPGK | |
| 459 | QVKLVESGAEVKKPGASVKVSCKASGYTFTSYWMHWVRQAPGQ | CD137.Bv1 |
| | VLEWMGEINPGNGHTSYAQKFQGRVTLTVDKSTSTAYMELSSLRS | scfv-Fc |
| | EDTAVYYCARSFTTARAFAYWGQGTTVTVSSGKPGSGKPGSGKP | |
| | GSGKPGSDIQMTQSPSSLSASVGDRVTITCRASQSISDYLHWYQQ | |
| | KPGKAPKLLIKYASQSISGVPSRFSGSGSGTDFTLTISSLQPEDFAT | |
| | YYCQDSHSFPPTFGGGTKVEIKEPKSSDKTHTCPPCPAPEFEGGP | |
| | SVFLFPPKPKDTLMISRTPEVTCVVVDVSHEDPEVKFNWYVDGVE | |
| | VHNAKTKPREEQYNSTYRVVSVLTVLHQDWLNGKEYKCKVSNKA | |
| | LPASIEKTISKAKGQPREPQVYTLPPCRKKLTKNQVSLTCLVKGFY | |
| | PSDIAVEWESNGQPENNYKTTPPVLKSDGSFFLYSKLTVDKSRWQ | |
| | QGNVFSCSVMHEALHNHYTQKSLSLSPGK | |
| 460 | QVKLVESGAEVKKPGASVKVSCKASGYTFTSYWMHWVRQAPGQ | CD137.Bv2 |
| | VLEWMGEINPGNGHTSYAQKFQGRVTLTVDKSTSTAYMELSSLRS | scfv-fc |
| | EDTAVYYCARSFTTARAFAYWGQGTTVTVSSGKPGSGKPGSGKP | |
| | GSGKPGSDIVMTQSPPTLSLSPGERVTLSCRASQSISDYLHWYQQ | |
| | KPGQSPRLLIKYASQSISGIPARFSGSGSGTDFTLTISSLEPEDFAV | |
| | YYCQDGHSFPPTFGGGTKVEIKEPKSSDKTHTCPPCPAPEFEGGP | |
| | SVFLFPPKPKDTLMISRTPEVTCVVVDVSHEDPEVKFNWYVDGVE | |
| | VHNAKTKPREEQYNSTYRVVSVLTVLHQDWLNGKEYKCKVSNKA | |
| | LPASIEKTISKAKGQPREPQVYTLPPCRKKLTKNQVSLTCLVKGFY | |
| | PSDIAVEWESNGQPENNYKTTPPVLKSDGSFFLYSKLTVDKSRWQ | |
| | QGNVFSCSVMHEALHNHYTQKSLSLSPGK | |
| 461 | QVQLVQSGAEVKKPGASVKLSCKASGYTFSSYWMEIWVRQAPGQ | CD137.Bv3 |
| | GLEWIGEINPGNGHTNYNEKFKSRVTMTRDTSTSTAYMELSSLRS | scfv-fc |
| | EDTAVYYCARSFKTARAFAYWGQGTLVTVSSGKPGSGKPGSGKP | |
| | GSGKPGSDIVMTQSPAFLSVTPGEKVTITCRASQTISDYLHWYQQ | |
| | KPDQAPKLLIKYASQSISGIPSRFSGSGSGTDFTFTISSLEAEDAAT | |
| | YYCQDGHSWPPTFGQGTKLEIKEPKSSDKTHTCPPCPAPEFEGG | |
| | PSVFLFPPKPKDTLMISRTPEVTCVVVDVSHEDPEVKFNWYVDGV | |
| | EVHNAKTKPREEQYNSTYRVVSVLTVLHQDWLNGKEYKCKVSNK | |
| | ALPASIEKTISKAKGQPREPQVYTLPPCRKKLTKNQVSLTCLVKGF | |
| | YPSDIAVEWESNGQPENNYKTTPPVLKSDGSFFLYSKLTVDKSRW | |
| | QQGNVFSCSVMHEALHNHYTQKSLSLSPGK | |
| 462 | QVQLVQSGAEVKKPGASVKVSCKASGYTFTSYWMHWVRQAPGQ | CD137.Bv4 |
| | GLEWMGIINPGNGHTSYAQKFQGRVTMTRDTSTSTVYMELSSLRS | scfv-fc |
| | EDTAVYYCARSFTTARAFAYWGQGTTVTVSSGKPGSGKPGSGKP | |
| | GSGKPGSDIQMTQSPSSLSASVGDRVTITCRASQSISDYLHWYQQ | |
| | KPGKAPKLLIKYASQSISGVPSRFSGSGSGTDFTLTISSLQPEDFAT | |
| | YYCQDSHSFPPTFGGGTKVEIKEPKSSDKTHTCPPCPAPEFEGGP | |
| | SVFLFPPKPKDTLMISRTPEVTCVVVDVSHEDPEVKFNWYVDGVE | |
| | VHNAKTKPREEQYNSTYRVVSVLTVLHQDWLNGKEYKCKVSNKA | |
| | LPASIEKTISKAKGQPREPQVYTLPPCRKKLTKNQVSLTCLVKGFY | |
| | PSDIAVEWESNGQPENNYKTTPPVLKSDGSFFLYSKLTVDKSRWQ | |
| | QGNVFSCSVMHEALHNHYTQKSLSLSPGK | |
| 463 | QVQLVQSGAEVKKPGASVKVSCKASGYTFTSYWMHWVRQAPGQ | CD137.Bv5 |
| | GLEWMGIINPGNGHTSYAQKFQGRVTMTRDTSTSTVYMELSSLRS | scfv-fc |
| | EDTAVYYCARSFTTARAFAYWGQGTTVTVSSGKPGSGKPGSGKP | |
| | GSGKPGSDIVMTQSPPTLSLSPGERVTLSCRASQSISDYLHWYQQ | |
| | KPGQSPRLLIKYASQSISGIPARFSGSGSGTDFTLTISSLEPEDFAV | |
| | YYCQDGHSFPPTFGGGTKVEIKEPKSSDKTHTCPPCPAPEFEGGP | |
| | SVFLFPPKPKDTLMISRTPEVTCVVVDVSHEDPEVKFNWYVDGVE | |
| | VHNAKTKPREEQYNSTYRVVSVLTVLHQDWLNGKEYKCKVSNKA | |
| | LPASIEKTISKAKGQPREPQVYTLPPCRKKLTKNQVSLTCLVKGFY | |
| | PSDIAVEWESNGQPENNYKTTPPVLKSDGSFFLYSKLTVDKSRWQ | |
| | QGNVFSCSVMHEALHNHYTQKSLSLSPGK | |
| 464 | QVQLVQSGAEVKKPGASVKVSCKASGYTFTSYWMHWVRQAPGQ | CD137.Bv6 |
| | RLEWMGEINPSNGHTKYSQKFQGRVTITVDKSASTAYMELSSLRS | scfv-fc |
| | EDTAVYYCARSFTTARAFAYWGQGTLVTVSSGKPGSGKPGSGKP | |
| | GSGKPGSDIQMTQSPSSLSASVGDRVTITCRASQSISDYLHWYQQ | |
| | KPGKAPKLLIKYASQSISGVPSRFSGSGSGTDFTLTISSLQPEDFAT | |
| | YYCQDSHSFPPTFGGGTKVEIKEPKSSDKTHTCPPCPAPEFEGGP | |
| | SVFLFPPKPKDTLMISRTPEVTCVVVDVSHEDPEVKFNWYVDGVE | |
| | VHNAKTKPREEQYNSTYRVVSVLTVLHQDWLNGKEYKCKVSNKA | |
| | LPASIEKTISKAKGQPREPQVYTLPPCRKKLTKNQVSLTCLVKGFY | |
| | PSDIAVEWESNGQPENNYKTTPPVLKSDGSFFLYSKLTVDKSRWQ | |
| | QGNVFSCSVMHEALHNHYTQKSLSLSPGK | |
| 465 | QVQLVQSGAEVKKPGASVKVSCKASGYTFTSYWMHWVRQAPGQ | CD137.Bv7 |
| | RLEWMGEINPSNGHTKYSQKFQGRVTITVDKSASTAYMELSSLRS | scfv-fc |
| | EDTAVYYCARSFTTARAFAYWGQGTLVTVSSGKPGSGKPGSGKP | |
| | GSGKPGSDIVMTQSPPTLSLSPGERVTLSCRASQSISDYLHWYQQ | |
| | KPGQSPRLLIKYASQSISGIPARFSGSGSGTDFTLTISSLEPEDFAV | |
| | YYCQDGHSFPPTFGGGTKVEIKEPKSSDKTHTCPPCPAPEFEGGP | |
| | SVFLFPPKPKDTLMISRTPEVTCVVVDVSHEDPEVKFNWYVDGVE | |
| | VHNAKTKPREEQYNSTYRVVSVLTVLHQDWLNGKEYKCKVSNKA | |
| | LPASIEKTISKAKGQPREPQVYTLPPCRKKLTKNQVSLTCLVKGFY | |
| | PSDIAVEWESNGQPENNYKTTPPVLKSDGSFFLYSKLTVDKSRWQ | |
| | QGNVFSCSVMHEALHNHYTQKSLSLSPGK | |
| 466 | QVQLVQSGAEVKKPGASVKVSCKASGYTFTDYFMNWVRQAPGQ | DLL3 |
| | CLEWMGVINPYNDITIYNQKFQGRVTMTVDRSTSTVYMELSSLRS | scfv-Fc |
| | EDTAVYYCAREGVLYDGYYEGAYWGQGTLVTVSSGKPGSGKPG | |
| | SGKPGSGKPGSDIQLTQSPSFLSASVGDRVTITCKASQNVGIAVA | |
| | WYQQKPGKAPKLLIYAASNRYTGVPSRFSGSGSGTEFTLTISSLQP | |
| | EDFATYYCQQYSTYPYTFGCGTKLEIKEPKSSDKTHTCPPCPAPEF | |
| | EGGPSVFLFPPKPKDTLMISRTPEVTCVVVDVSHEDPEVKFNWYV | |
| | DGVEVHNAKTKPREEQYNSTYRVVSVLTVLHQDWLNGKEYKCKV | |
| | SNKALPASIEKTISKAKGQPREPQVYTLPPCRKKLTKNQVSLTCLV | |
| | KGFYPSDIAVEWESNGQPENNYKTTPPVLKSDGSFFLYSKLTVDK | |
| | SRWQQGNVFSCSVMHEALHNHYTQKSLSLSPGK | |
| 467 | EVQLLESGGGLVQPGGSLRLSCAASGFTFSSYGMHWVRQAPGK | DLL3 |
| | GLEWVAVISHHGSSKYYADSVKGRFTISRDNSKNTLYLQMNSLRA | scfv-Fc |
| | EDTAVYYCARDWFFYLFDYWGQGTLVTVSSGKPGSGKPGSGKP | |
| | GSGKPGSDIVMTQSPLSLPVTPGEPASISCKSSQSLLHSDGKTFLY | |
| | WYLQKPGQSPQLLIYEVSNRFSGVPDRFSGSGSGTDFTLKISRVE | |
| | AEDVGVYYCLQGERLPFTFGQGTKVEIKEPKSSDKTHTCPPCPAP | |
| | EFEGGPSVFLFPPKPKDTLMISRTPEVTCVVVDVSHEDPEVKFNW | |
| | YVDGVEVHNAKTKPREEQYNSTYRVVSVLTVLHQDWLNGKEYKC | |
| | KVSNKALPASIEKTISKAKGQPREPQVYTLPPCRKKLTKNQVSLTC | |
| | LVKGFYPSDIAVEWESNGQPENNYKTTPPVLKSDGSFFLYSKLTV | |
| | DKSRWQQGNVFSCSVMHEALHNHYTQKSLSLSPGK | |
| 468 | QVQLVQSGAEVKKPGASVKVSCKASGYTFTDYFMNWVRQAPGQ | DLL3scFv- |
| | GLEWMGVINPYNDITIYNQKFQGRVTMTVDRSTSTVYMELSSLRS | 41BBscFv-fc |
| | EDTAVYYCAREGVLYDGYYEGAYWGQGTLVTVSSGGGGSGGGG | x |
| | SGGGGSDIQLTQSPSFLSASVGDRVTITCKASQNVGIAVAWYQQK | 41BBFab-fc |
| | PGKAPKLLIYAASNRYTGVPSRFSGSGSGTEFTLTISSLQPEDFAT | |
| | YYCQQYSTYPYTFGQGTKLEIKSGGGGSQVQLVQSGAEVKKPGA | |
| | SVKVSCKASGYTFSSYWMHWVRQAPGQRLEWMGEINPGNGHTN | |
| | YSQKFQGRVTITVDKSASTAYMELSSLRSEDTAVYYCARSFTTARA | |
| | FAYWGQGTLVTVSSGKPGSGKPGSGKPGSGKPGSDIVMTQSPPT | |
| | LSLSPGERVTLSCRASQSISDYLHWYQQKPGQSPRLLIKYASQSIS | |
| | GIPARFSGSGSGTDFTLTISSLEPEDFAVYYCQDGHSFPPTFGGGT | |
| | KVEIKEPKSSDKTHTCPPCPAPEFEGGPSVFLFPPKPKDTLMISRT | |
| | PEVTCVVVDVSHEDPEVKFNWYVDGVEVHNAKTKPREEQYNSTY | |
| | RVVSVLTVLHQDWLNGKEYKCKVSNKALPASIEKTISKAKGQPREP | |
| | QVYTLPPCRKKLTKNQVSLTCLVKGFYPSDIAVEWESNGQPENNY | |
| | KTTPPVLKSDGSFFLYSKLTVDKSRWQQGNVFSCSVMHEALHNH | |
| | YTQKSLSLSPGK | |
| 469 | QVQLVQSGAEVKKPGASVKVSCKASGYTFSSYWMHWVRQAPGQ | 4-1BBscFv- |
| | RLEWMGEINPGNGHTNYSQKFQGRVTITVDKSASTAYMELSSLRS | 41BBscFv-Fc |
| | EDTAVYYCARSFTTARAFAYWGQGTLVTVSSGGGGSGGGGSGG | x |
| | GGSGGGGSDIVMTQSPPTLSLSPGERVTLSCRASQSISDYLHWYQ | DLL3Fab- |
| | QKPGQSPRLLIKYASQSISGIPARFSGSGSGTDFTLTISSLEPEDFA | Fc |
| | VYYCQDGHSFPPTFGGGTKVEIKSGGGGSQVQLVQSGAEVKKPG | |
| | ASVKVSCKASGYTFSSYWMHWVRQAPGQRLEWMGEINPGNGHT | |
| | NYSQKFQGRVTITVDKSASTAYMELSSLRSEDTAVYYCARSFTTA | |
| | RAFAYWGQGTLVTVSSGKPGSGKPGSGKPGSGKPGSDIVMTQSP | |
| | PTLSLSPGERVTLSCRASQSISDYLHWYQQKPGQSPRLLIKYASQS | |
| | ISGIPARFSGSGSGTDFTLTISSLEPEDFAVYYCQDGHSFPPTFGG | |
| | GTKVEIKEPKSSDKTHTCPPCPAPEFEGGPSVFLFPPKPKDTLMIS | |
| | RTPEVTCVVVDVSHEDPEVKFNWYVDGVEVHNAKTKPREEQYNS | |
| | TYRVVSVLTVLHQDWLNGKEYKCKVSNKALPASIEKTISKAKGQPR | |
| | EPQVYTLPPCRKKLTKNQVSLTCLVKGFYPSDIAVEWESNGQPEN | |
| | NYKTTPPVLKSDGSFFLYSKLTVDKSRWQQGNVFSCSVMHEALH | |
| | NHYTQKSLSLSPGK | |
| 470 | QVQLVQSGAEVKKPGASVKVSCKASGYTFSSYWMHWVRQAPGQ | 41BBFab-Fc- |
| | RLEWMGEINPGNGHTNYSQKFQGRVTITVDKSASTAYMELSSLRS | DLL3scFv |
| | EDTAVYYCARSFTTARAFAYWGQGTLVTVSSASTKGPSVFPLAPS | |
| | SKSTSGGTAALGCLVKDYFPEPVTVSWNSGALTSGVHTFPAVLQS | |
| | SGLYSLSSVVTVPSSSLGTQTYICNVNHKPSNTKVDKRVEPKSCD | |
| | KTHTCPPCPAPEFEGGPSVFLFPPKPKDTLMISRTPEVTCVVVDVS | |
| | HEDPEVKFNWYVDGVEVHNAKTKPREEQYNSTYRVVSVLTVLHQ | |
| | DWLNGKEYKCKVSNKALPASIEKTISKAKGQPREPQVCTLPPSRD | |
| | ELTKNQVSLTCLVEGFYPSDIAVEWESNGQPENNYKTTPPVLDSD | |
| | GSFFLYSDLTVDKSRWQQGNVFSCSVMHEALHNHYTQESLSLSP | |
| | GKSGGGGSQVQLVQSGAEVKKPGASVKVSCKASGYTFTDYFMN | |
| | WVRQAPGQGLEWMGVINPYNDITIYNQKFQGRVTMTVDRSTSTV | |
| | YMELSSLRSEDTAVYYCAREGVLYDGYYEGAYWGQGTLVTVSSG | |
| | GGGSGGGGSGGGGSDIQLTQSPSFLSASVGDRVTITCKASQNVGI | |
| | AVAWYQQKPGKAPKLLIYAASNRYTGVPSRFSGSGSGTEFTLTISS | |
| | LQPEDFATYYCQQYSTYPYTFGQGTKLEIK | |
| 471 | QVQLQQWGAGLLKPSETLSLTCAVYGGSFSGYYWSWIRQSPEKG | 41BBFab-Fc- |
| | LEWIGEINHGGYVTYNPSLESRVTISVDTSKNQFSLKLSSVTAADTA | DLL3scFv |
| | VYYCARDYGPGNYDVVYFDLWGRGTLVTVSSASTKGPSVFPLAPS | |
| | SKSTSGGTAALGCLVKDYFPEPVTVSWNSGALTSGVHTFPAVLQS | |
| | SGLYSLSSVVTVPSSSLGTQTYICNVNHKPSNTKVDKRVEPKSCD | |
| | KTHTCPPCPAPEFEGGPSVFLFPPKPKDTLMISRTPEVTCVVVDVS | |
| | HEDPEVKFNWYVDGVEVHNAKTKPREEQYNSTYRVVSVLTVLHQ | |
| | DWLNGKEYKCKVSNKALPASIEKTISKAKGQPREPQVYTLPPCRK | |
| | KLTKNQVSLTCLVKGFYPSDIAVEWESNGQPENNYKTTPPVLKSD | |
| | GSFFLYSKLTVDKSRWQQGNVFSCSVMHEALHNHYTQKSLSLSP | |
| | GKSGGGGSQVQLVQSGAEVKKPGASVKVSCKASGYTFTDYFMN | |
| | WVRQAPGQGLEWMGVINPYNDITIYNQKFQGRVTMTVDRSTSTV | |
| | YMELSSLRSEDTAVYYCAREGVLYDGYYEGAYWGQGTLVTVSSG | |
| | GGGSGGGGSGGGGSDIQLTQSPSFLSASVGDRVTITCKASQNVGI | |
| | AVAWYQQKPGKAPKLLIYAASNRYTGVPSRFSGSGSGTEFTLTISS | |
| | LQPEDFATYYCQQYSTYPYTFGQGTKLEIK | |
| 472 | QVQLVQSGAEVKKPGASVKVSCKASGYTFSSYWMHWVRQAPGQ | 41BBFab-Fc- |
| | RLEWMGEINPGNGHTNYSQKFQGRVTITVDKSASTAYMELSSLRS | DLL3scFv |
| | EDTAVYYCARSFTTARAFAYWGQGTLVTVSSASTKGPSVFPLAPS | |
| | SKSTSGGTAALGCLVKDYFPEPVTVSWNSGALTSGVHTFPAVLQS | |
| | SGLYSLSSVVTVPSSSLGTQTYICNVNHKPSNTKVDKRVEPKSCD | |
| | KTHTCPPCPAPEFEGGPSVFLFPPKPKDTLMISRTPEVTCVVVDVS | |
| | HEDPEVKFNWYVDGVEVHNAKTKPREEQYNSTYRVVSVLTVLHQ | |
| | DWLNGKEYKCKVSNKALPASIEKTISKAKGQPREPQVYTLPPCRK | |
| | KLTKNQVSLTCLVKGFYPSDIAVEWESNGQPENNYKTTPPVLKSD | |
| | GSFFLYSKLTVDKSRWQQGNVFSCSVMHEALHNHYTQKSLSLSP | |
| | GKSGGGGSQVQLVQSGAEVKKPGASVKVSCKASGYTFTDYFMN | |
| | WVRQAPGQGLEWMGVINPYNDITIYNQKFQGRVTMTVDRSTSTV | |
| | YMELSSLRSEDTAVYYCAREGVLYDGYYEGAYWGQGTLVTVSSG | |
| | GGGSGGGGSGGGGSDIQLTQSPSFLSASVGDRVTITCKASQNVGI | |
| | AVAWYQQKPGKAPKLLIYAASNRYTGVPSRFSGSGSGTEFTLTISS | |
| | LQPEDFATYYCQQYSTYPYTFGQGTKLEIK | |
| 473 | QVQLQQWGAGLLKPSETLSLTCAVYGGSFSGYYWSWIRQSPEKG | 41BBFab-Fc- |
| | LEWIGEINHGGYVTYNPSLESRVTISVDTSKNQFSLKLSSVTAADTA | DLL3scFv |
| | VYYCARDYGPGNYDVVYFDLWGRGTLVTVSSASTKGPSVFPLAPS | |
| | SKSTSGGTAALGCLVKDYFPEPVTVSWNSGALTSGVHTFPAVLQS | |
| | SGLYSLSSVVTVPSSSLGTQTYICNVNHKPSNTKVDKRVEPKSCD | |
| | KTHTCPPCPAPEFEGGPSVFLFPPKPKDTLMISRTPEVTCVVVDVS | |
| | HEDPEVKFNWYVDGVEVHNAKTKPREEQYNSTYRVVSVLTVLHQ | |
| | DWLNGKEYKCKVSNKALPASIEKTISKAKGQPREPQVCTLPPSRD | |
| | ELTKNQVSLTCLVEGFYPSDIAVEWESNGQPENNYKTTPPVLDSD | |
| | GSFFLYSDLTVDKSRWQQGNVFSCSVMHEALHNHYTQESLSLSP | |
| | GKSGGGGSQVQLVQSGAEVKKPGASVKVSCKASGYTFTDYFMN | |
| | WVRQAPGQGLEWMGVINPYNDITIYNQKFQGRVTMTVDRSTSTV | |
| | YMELSSLRSEDTAVYYCAREGVLYDGYYEGAYWGQGTLVTVSSG | |
| | GGGSGGGGSGGGGSDIQLTQSPSFLSASVGDRVTITCKASQNVGI | |
| | AVAWYQQKPGKAPKLLIYAASNRYTGVPSRFSGSGSGTEFTLTISS | |
| | LQPEDFATYYCQQYSTYPYTFGQGTKLEIK | |
| 474 | EVQLVQSGAEVKKPGESLKISCKGSGYEFSSHVVMNWVRQMPGK | Muc17scfv- |
| | CLEWMGQIYPGDGDINYNEKFRGQVTISADKSISTAYLQWSSLKAS | fc |
| | DTAMYYCARHGNYVMDYWGQGTLVTVSSGKPGSGKPGSGKPGS | |
| | GKPGSIQLTQSPSFLSASVGDRVTITCSASSSVSYMFWYQQKPGK | |
| | APKPWIYRTSNLASGVPSRFSGSGSGTEFTLTISSLQPEDFATYYC | |
| | QQFHDYPRTFGCGTKVEIKEPKSSDKTHTCPPCPAPEFEGGPSVF | |
| | LFPPKPKDTLMISRTPEVTCVVVDVSHEDPEVKFNWYVDGVEVHN | |
| | AKTKPREEQYNSTYRVVSVLTVLHQDWLNGKEYKCKVSNKALPAS | |
| | IEKTISKAKGQPREPQVYTLPPCRKKLTKNQVSLTCLVKGFYPSDIA | |
| | VEWESNGQPENNYKTTPPVLKSDGSFFLYSKLTVDKSRWQQGNV | |
| | FSCSVMHEALHNHYTQKSLSLSPGK | |
| 475 | QVQLVQSGAEVKKPGASVKVSCKASGYTFTNFGITWVRQAPGQG | CLDN182. |
| | LEWMGEIYPSSGNTFYNEKFKGRVTMTTDTSTSTAYMELRSLRSD | scfv-Fc |
| | DTAVYYCARGGGPLRSRYFDYWGQGTLVTVSSGKPGSGKPGSG | |
| | KPGSGKPGSDIVMTQSPDSLAVSLGERATINCRSSQSLFSSGNQK | |
| | NYLTWYQQKPGQPPKLLIYWASTRESGVPDRFSGSGSGTDFTLTI | |
| | SSLQAEDVAVYYCQNDYYYPLTFGGGTKVEIKEPKSSDKTHTCPP | |
| | CPAPEFEGGPSVFLFPPKPKDTLMISRTPEVTCVVVDVSHEDPEVK | |
| | FNWYVDGVEVHNAKTKPREEQYNSTYRVVSVLTVLHQDWLNGKE | |
| | YKCKVSNKALPASIEKTISKAKGQPREPQVYTLPPCRKKLTKNQVS | |
| | LTCLVKGFYPSDIAVEWESNGQPENNYKTTPPVLKSDGSFFLYSKL | |
| | TVDKSRWQQGNVFSCSVMHEALHNHYTQKSLSLSPGK | |
| 476 | EVQLVESGGGLVQPGGSLRLSCAASGFTFSSFGMHWVRQAPGK | CLDN182. |
| | GLEWVSYISSGNSAIYYADTVNGRFTISRDNAKNSLYLQMNSLRAE | scfv-Fc |
| | DTAVYYCARLRYGNSFDYWGQGTLVTVSSGKPGSGKPGSGKPG | |
| | SGKPGSDIVMTQSPDSLAVSLGERATINCKSSQSLLNSGNQKNYL | |
| | TWYQQKPGQPPKLLIYWASTRESGVPDRFSGSGSGTDFTLTISSL | |
| | QAEDVAVYYCQNNYYYPLTFGGGTKVEIKEPKSSDKTHTCPPCPA | |
| | PEFEGGPSVFLFPPKPKDTLMISRTPEVTCVVVDVSHEDPEVKFN | |
| | WYVDGVEVHNAKTKPREEQYNSTYRVVSVLTVLHQDWLNGKEYK | |
| | CKVSNKALPASIEKTISKAKGQPREPQVYTLPPCRKKLTKNQVSLT | |
| | CLVKGFYPSDIAVEWESNGQPENNYKTTPPVLKSDGSFFLYSKLT | |
| | VDKSRWQQGNVFSCSVMHEALHNHYTQKSLSLSPGK | |
| 477 | QVQLVQSGAEVKKPGSSVKVSCKASGYAFNNYWMNWVRQAPGQ | CLDN182. |
| | GLEWMGQISPGNGNSNFNGKFKGRVTITADKSTSTAYMELSSLRS | scfv-Fc |
| | EDTAVYYCARGGRYGNAMDYWGQGTTVTVSSGKPGSGKPGSGK | |
| | PGSGKPGSDIVMTQSPDSLAVSLGERATINCKSSQSLLNSGNQRN | |
| | YLTWYQQKPGQPPKLLIYWASTRESGVPDRFSGSGSGTDFTLTIS | |
| | SLQAEDVAVYYCQNAYFYPYTFGGGTKVEIKEPKSSDKTHTCPPC | |
| | PAPEFEGGPSVFLFPPKPKDTLMISRTPEVTCVVVDVSHEDPEVKF | |
| | NWYVDGVEVHNAKTKPREEQYNSTYRVVSVLTVLHQDWLNGKEY | |
| | KCKVSNKALPASIEKTISKAKGQPREPQVYTLPPCRKKLTKNQVSL | |
| | TCLVKGFYPSDIAVEWESNGQPENNYKTTPPVLKSDGSFFLYSKLT | |
| | VDKSRWQQGNVFSCSVMHEALHNHYTQKSLSLSPGK | |
| 478 | QVQLVQSGAEVKKPGASVKVSCKASGYTFTNSGMNWVRQAPGQ | CLDN182. |
| | GLEWMGWINTNTGEPTFAEEFRGRVTMTRDTSISTAYMELSRLRS | scfv-Fc |
| | DDTAVYYCARYYYGNSFAYWGQGTLVTVSSGKPGSGKPGSGKP | |
| | GSGKPGSDIVMTQSPDSLAVSLGERATINCKSSQSLLNSGNQKNY | |
| | LTWYQQKPGQPPKLLIYWASTRESGVPDRFSGSGSGTDFTLTISS | |
| | LQAEDVAVYYCQNNYFYPLTFGGGTKVEIKEPKSSDKTHTCPPCP | |
| | APEFEGGPSVFLFPPKPKDTLMISRTPEVTCVVVDVSHEDPEVKFN | |
| | WYVDGVEVHNAKTKPREEQYNSTYRVVSVLTVLHQDWLNGKEYK | |
| | CKVSNKALPASIEKTISKAKGQPREPQVYTLPPCRKKLTKNQVSLT | |
| | CLVKGFYPSDIAVEWESNGQPENNYKTTPPVLKSDGSFFLYSKLT | |
| | VDKSRWQQGNVFSCSVMHEALHNHYTQKSLSLSPGK | |
| 479 | QVQLVQSGAEVKKPGASVKVSCKASGYTFTSYWMHWVRQAPGQ | CD137.bV8 |
| | GLEWMGIINPGNGHTSYAQKFQGRVTMTRDTSTSTVYMELSSLRS | scfv-Fc |
| | EDTAVYYCARSFTTARAFAYWGQGTTVTVSSGKPGSGKPGSGKP | |
| | GSGKPGSDIQMTQSPSSLSASVGDRVTITCRASQSISDYLHWYQQ | |
| | KPGKAPKLLIKYASQSISGVPSRFSGSGSGTDFTLTISSLQPEDFAT | |
| | YYCQDSHSFPPTFGGGTKVEIKEPKSSDKTHTCPPCPAPEFEGGP | |
| | SVFLFPPKPKDTLMISRTPEVTCVVVDVSHEDPEVKFNWYVDGVE | |
| | VHNAKTKPREEQYNSTYRVVSVLTVLHQDWLNGKEYKCKVSNKA | |
| | LPASIEKTISKAKGQPREPQVYTLPPCRKKLTKNQVSLTCLVKGFY | |
| | PSDIAVEWESNGQPENNYKTTPPVLKSDGSFFLYSKLTVDKSRWQ | |
| | QGNVFSCSVMHEALHNHYTQKSLSLSPGK | |
| 480 | EVQLVESGGGLVQPGGSLRLSCAASGFTFSTYAMNWVRQAPGK | CD3scfv- |
| | GLEWVGRIRSKYNNYATYYADSVKGRFTISRDDSKNTLYLQMNSL | CD28scfv- |
| | RAEDTAVYYCVRHGNFGDSYVSWFEYWGQGTLVTVSSGGGGSG | Fc |
| | GGGSGGGGSGGGGSQAVVTQEPSLTVSPGGTVTLTCGSSTGAV | |
| | TTSNYANWVQQKPGKSPRGLIGGTNKRAPGVPARFSGSLLGGKA | |
| | ALTISGAQPEDEADYYCALWYSNHWVFGGGTKLTVLSGGGGSQV | |
| | QLVQSGAEVKKPGASVKVSCKASGYTFTSYYIHWVRQAPGQGLE | |
| | WIGSIYPGNVNTNYNEKFKDRATLTVDTSISTAYMELSRLRSDDTA | |
| | VYFCTRSHYGLDWNFDVWGQGTTVTVSSGKPGSGKPGSGKPGS | |
| | GKPGSDIQMTQSPSSLSASVGDRVTITCHASQNIYVWLNWYQQKP | |
| | GKAPKLLIYKASNLHTGVPSRFSGSGSGTDFTLTISSLQPEDFATYY | |
| | CQQGQTYPYTFGGGTKVEIKEPKSSDKTHTCPPCPAPEFEGGPSV | |
| | FLFPPKPKDTLMISRTPEVTCVVVDVSHEDPEVKFNWYVDGVEVH | |
| | NAKTKPREEQYNSTYRVVSVLTVLHQDWLNGKEYKCKVSNKALPA | |
| | SIEKTISKAKGQPREPQVYTLPPCRKKLTKNQVSLTCLVKGFYPSDI | |
| | AVEWESNGQPENNYKTTPPVLKSDGSFFLYSKLTVDKSRWQQGN | |
| | VFSCSVMHEALHNHYTQKSLSLSPGK | |
| 481 | QVQLVQSGAEVKKPGASVKVSCKASGYTFTSYYIHWVRQAPGQG | CD28scfv- |
| | LEWIGSIYPGNVNTNYNEKFKDRATLTVDTSISTAYMELSRLRSDD | CD3scfv-Fc |
| | TAVYFCTRSHYGLDWNFDVWGQGTTVTVSSGKPGSGKPGSGKP | |
| | GSGKPGSDIQMTQSPSSLSASVGDRVTITCHASQNIYVWLNWYQ | |
| | QKPGKAPKLLIYKASNLHTGVPSRFSGSGSGTDFTLTISSLQPEDF | |
| | ATYYCQQGQTYPYTFGGGTKVEIKSGGGGSEVQLVESGGGLVQP | |
| | GGSLRLSCAASGFTFSTYAMNWVRQAPGKGLEWVGRIRSKYNNY | |
| | ATYYADSVKGRFTISRDDSKNTLYLQMNSLRAEDTAVYYCVRHGN | |
| | FGDSYVSWFEYWGQGTLVTVSSGGGGSGGGGSGGGGSGGGGS | |
| | QAVVTQEPSLTVSPGGTVTLTCGSSTGAVTTSNYANWVQQKPGK | |
| | SPRGLIGGTNKRAPGVPARFSGSLLGGKAALTISGAQPEDEADYY | |
| | CALWYSNHWVFGGGTKLTVLEPKSSDKTHTCPPCPAPEFEGGPS | |
| | VFLFPPKPKDTLMISRTPEVTCVVVDVSHEDPEVKFNWYVDGVEV | |
| | HNAKTKPREEQYNSTYRVVSVLTVLHQDWLNGKEYKCKVSNKAL | |
| | PASIEKTISKAKGQPREPQVYTLPPCRKKLTKNQVSLTCLVKGFYP | |
| | SDIAVEWESNGQPENNYKTTPPVLKSDGSFFLYSKLTVDKSRWQQ | |
| | GNVFSCSVMHEALHNHYTQKSLSLSPGK | |
| 482 | DVQLQESGPGLVKPSQSLSLTCTVTGYSITSDYAWNWIRQFPGNK | HC; CD28 |
| | LEWMGYIRYSGSTSYNPSLKSRISITRDTSKNQFFLQLNSVTTEDT | |
| | ATYYCARDWPRPSYWYFDVWGAGTTVTVSSASTKGPSVFPLAPS | |
| | SKSTSGGTAALGCLVKDYFPEPVTVSWNSGALTSGVHTFPAVLQS | |
| | SGLYSLSSVVTVPSSSLGTQTYICNVNHKPSNTKVDKRVEPKSCD | |
| | KTHTCPPCPAPEFEGGPSVFLFPPKPKDTLMISRTPEVTCVVVDVS | |
| | HEDPEVKFNWYVDGVEVHNAKTKPREEQYNSTYRVVSVLTVLHQ | |
| | DWLNGKEYKCKVSNKALPASIEKTISKAKGQPREPQVCTLPPSRD | |
| | ELTKNQVSLTCLVEGFYPSDIAVEWESNGQPENNYKTTPPVLDSD | |
| | GSFFLYSDLTVDKSRWQQGNVFSCSVMHEALHNHYTQESLSLSP | |
| | GK | |
| 483 | DIQTTQTTSSLSASLGDRVTISCRAGQDISNYLNWYQQKPDGTVKL | LC-CD28 |
| | LIYYTSRLHSGVPSRFSGSGSGTDYSLTISNLEQEDIATYFCQQGH | |
| | TLPWTFGGGTKLEIKRTVAAPSVFIFPPSDEQLKSGTASVVCLLNN | |
| | FYPREAKVQWKVDNALQSGNSQESVTEQDSKDSTYSLSSTLTLSK | |
| | ADYEKHKVYACEVTHQGLSSPVTKSFNRGEC | |
| 484 | EVQLVESGGGLVQPGGSLRLSCAASGFTFSDYWMSWVRQAPGK | CD137.39 |
| | GLEWVADIKNDGSYTNYAPSLTNRFTISRDNAKNSLYLQMNSLRA | scfv-CD3scfv- |
| | EDTAVYYCARELTGTWGQGTMVTVSSGGGGSGGGGSGGGGSG | Fc |
| | GGGSDIVMTQSPDSLAVSLGERATINCKSSQSLLSSGNQKNYLAW | |
| | YQQKPGQPPKLLIYYASTRQSGVPDRFSGSGSGTDFTLTISSLQAE | |
| | DVAVYYCLQYDRYPFTFGQGTKLEIKSGGGGSEVQLVESGGGLV | |
| | QPGGSLRLSCAASGFTFSTYAMNWVRQAPGKGLEWVGRIRSKYN | |
| | NYATYYADSVKGRFTISRDDSKNTLYLQMNSLRAEDTAVYYCVRH | |
| | GNFGDSYVSWFEYWGQGTLVTVSSGKPGSGKPGSGKPGSGKPG | |
| | SQAVVTQEPSLTVSPGGTVTLTCGSSTGAVTTSNYANWVQQKPG | |
| | KSPRGLIGGTNKRAPGVPARFSGSLLGGKAALTISGAQPEDEADY | |
| | YCALWYSNHWVFGGGTKLTVLEPKSSDKTHTCPPCPAPEFEGGP | |
| | SVFLFPPKPKDTLMISRTPEVTCVVVDVSHEDPEVKFNWYVDGVE | |
| | VHNAKTKPREEQYNSTYRVVSVLTVLHQDWLNGKEYKCKVSNKA | |
| | LPASIEKTISKAKGQPREPQVYTLPPCRKKLTKNQVSLTCLVKGFY | |
| | PSDIAVEWESNGQPENNYKTTPPVLKSDGSFFLYSKLTVDKSRWQ | |
| | QGNVFSCSVMHEALHNHYTQKSLSLSPGK | |
| 486 | QVQLVQSGAEVKKPGASVKVSCKASGYTFSSYWMHWVRQAPGQ | CD137.b |
| | RLEWMGEINPGNGHTNYSQKFQGRVTITVDKSASTAYMELSSLRS | scfv- |
| | EDTAVYYCARSFTTARAFAYWGQGTLVTVSSGGGGSGGGGSGG | CD3scfv-Fc |
| | GGSGGGGSDIVMTQSPPTLSLSPGERVTLSCRASQSISDYLHWYQ | |
| | QKPGQSPRLLIKYASQSISGIPARFSGSGSGTDFTLTISSLEPEDFA | |
| | VYYCQDGHSFPPTFGGGTKVEIKSGGGGSEVQLVESGGGLVQPG | |
| | GSLRLSCAASGFTFSTYAMNWVRQAPGKGLEWVGRIRSKYNNYA | |
| | TYYADSVKGRFTISRDDSKNTLYLQMNSLRAEDTAVYYCVRHGNF | |
| | GDSYVSWFEYWGQGTLVTVSSGKPGSGKPGSGKPGSGKPGSQA | |
| | VVTQEPSLTVSPGGTVTLTCGSSTGAVTTSNYANWVQQKPGKSP | |
| | RGLIGGTNKRAPGVPARFSGSLLGGKAALTISGAQPEDEADYYCA | |
| | LWYSNHWVFGGGTKLTVLEPKSSDKTHTCPPCPAPEFEGGPSVF | |
| | LFPPKPKDTLMISRTPEVTCVVVDVSHEDPEVKFNWYVDGVEVHN | |
| | AKTKPREEQYNSTYRVVSVLTVLHQDWLNGKEYKCKVSNKALPAS | |
| | IEKTISKAKGQPREPQVYTLPPCRKKLTKNQVSLTCLVKGFYPSDIA | |
| | VEWESNGQPENNYKTTPPVLKSDGSFFLYSKLTVDKSRWQQGNV | |
| | FSCSVMHEALHNHYTQKSLSLSPGK | |
| 487 | QVQLQQWGAGLLKPSETLSLTCAVYGGSFSGYYWSWIRQSPEKG | CD137.U- |
| | LEWIGEINHGGYVTYNPSLESRVTISVDTSKNQFSLKLSSVTAADTA | Fc-CD3scfv |
| | VYYCARDYGPGNYDVVYFDLWGRGTLVTVSSASTKGPSVFPLAPS | |
| | SKSTSGGTAALGCLVKDYFPEPVTVSWNSGALTSGVHTFPAVLQS | |
| | SGLYSLSSVVTVPSSSLGTQTYICNVNHKPSNTKVDKRVEPKSCD | |
| | KTHTCPPCPAPEFEGGPSVFLFPPKPKDTLMISRTPEVTCVVVDVS | |
| | HEDPEVKFNWYVDGVEVHNAKTKPREEQYNSTYRVVSVLTVLHQ | |
| | DWLNGKEYKCKVSNKALPASIEKTISKAKGQPREPQVYTLPPCRK | |
| | KLTKNQVSLTCLVKGFYPSDIAVEWESNGQPENNYKTTPPVLKSD | |
| | GSFFLYSKLTVDKSRWQQGNVFSCSVMHEALHNHYTQKSLSLSP | |
| | GKSGGGGSEVQLVESGGGLVQPGGSLRLSCAASGFTFSTYAMN | |
| | WVRQAPGKGLEWVGRIRSKYNNYATYYADSVKGRFTISRDDSKN | |
| | TLYLQMNSLRAEDTAVYYCVRHGNFGDSYVSWFEYWGQGTLVTV | |
| | SSGGGGSGGGGSGGGGSGGGGSQAVVTQEPSLTVSPGGTVTLT | |
| | CGSSTGAVTTSNYANWVQQKPGKSPRGLIGGTNKRAPGVPARFS | |
| | GSLLGGKAALTISGAQPEDEADYYCALWYSNHWVFGGGTKLTVL | |
| 488 | EPKSSDKTHTCPPCPAPEFEGGPSVFLFPPKPKDTLMISRTPEVTC | Fc- |
| | VVVDVSHEDPEVKFNWYVDGVEVHNAKTKPREEQYNSTYRVVSV | CD137.Bscfv |
| | LTVLHQDWLNGKEYKCKVSNKALPASIEKTISKAKGQPREPQVCTL | |
| | PPSRDELTKNQVSLTCLVEGFYPSDIAVEWESNGQPENNYKTTPP | |
| | VLDSDGSFFLYSDLTVDKSRWQQGNVFSCSVMHEALHNHYTQES | |
| | LSLSPGKSGGGSQVQLVQSGAEVKKPGASVKVSCKASGYTFSSY | |
| | WMHWVRQAPGQRLEWMGEINPGNGHTNYSQKFQGRVTITVDKS | |
| | ASTAYMELSSLRSEDTAVYYCARSFTTARAFAYWGQGTLVTVSSG | |
| | KPGSGKPGSGKPGSGKPGSDIVMTQSPPTLSLSPGERVTLSCRAS | |
| | QSISDYLHWYQQKPGQSPRLLIKYASQSISGIPARFSGSGSGTDFT | |
| | LTISSLEPEDFAVYYCQDGHSFPPTFGGGTKVEIK | |
| 489 | EPKSSDKTHTCPPCPAPEFEGGPSVFLFPPKPKDTLMISRTPEVTC | Fc- |
| | VVVDVSHEDPEVKFNWYVDGVEVHNAKTKPREEQYNSTYRVVSV | CD137.Bscfv- |
| | LTVLHQDWLNGKEYKCKVSNKALPASIEKTISKAKGQPREPQVCTL | CD137.Bscfv |
| | PPSRDELTKNQVSLTCLVEGFYPSDIAVEWESNGQPENNYKTTPP | |
| | VLDSDGSFFLYSDLTVDKSRWQQGNVFSCSVMHEALHNHYTQES | |
| | LSLSPGKSGGGSQVQLVQSGAEVKKPGASVKVSCKASGYTFSSY | |
| | WMHWVRQAPGQRLEWMGEINPGNGHTNYSQKFQGRVTITVDKS | |
| | ASTAYMELSSLRSEDTAVYYCARSFTTARAFAYWGQGTLVTVSSG | |
| | KPGSGKPGSGKPGSGKPGSDIVMTQSPPTLSLSPGERVTLSCRAS | |
| | QSISDYLHWYQQKPGQSPRLLIKYASQSISGIPARFSGSGSGTDFT | |
| | LTISSLEPEDFAVYYCQDGHSFPPTFGGGTKVEIKSGGGSQVQLV | |
| | QSGAEVKKPGASVKVSCKASGYTFSSYWMHWVRQAPGQRLEW | |
| | MGEINPGNGHTNYSQKFQGRVTITVDKSASTAYMELSSLRSEDTA | |
| | VYYCARSFTTARAFAYWGQGTLVTVSSGKPGSGKPGSGKPGSGK | |
| | PGSDIVMTQSPPTLSLSPGERVTLSCRASQSISDYLHWYQQKPGQ | |
| | SPRLLIKYASQSISGIPARFSGSGSGTDFTLTISSLEPEDFAVYYCQ | |
| | DGHSFPPTFGGGTKVEIK | |
| 490 | EVQLVESGGGLVQPGGSLRLSCAASGFTFSTYAMNWVRQAPGK | CD3scfv- |
| | GLEWVGRIRSKYNNYATYYADSVKGRFTISRDDSKNTLYLQMNSL | CD137.39scfv- |
| | RAEDTAVYYCVRHGNFGDSYVSWFEYWGQGTLVTVSSGGGGSG | Fc |
| | GGGSGGGGSGGGGSQAVVTQEPSLTVSPGGTVTLTCGSSTGAV | |
| | TTSNYANWVQQKPGKSPRGLIGGTNKRAPGVPARFSGSLLGGKA | |
| | ALTISGAQPEDEADYYCALWYSNHWVFGGGTKLTVLSGGGGSEV | |
| | QLVESGGGLVQPGGSLRLSCAASGFTFSDYWMSWVRQAPGKGL | |
| | EWVADIKNDGSYTNYAPSLTNRFTISRDNAKNSLYLQMNSLRAED | |
| | TAVYYCARELTGTWGQGTMVTVSSGKPGSGKPGSGKPGSGKPG | |
| | SDIVMTQSPDSLAVSLGERATINCKSSQSLLSSGNQKNYLAWYQQ | |
| | KPGQPPKLLIYYASTRQSGVPDRFSGSGSGTDFTLTISSLQAEDVA | |
| | VYYCLQYDRYPFTFGQGTKLEIKEPKSSDKTHTCPPCPAPEFEGG | |
| | PSVFLFPPKPKDTLMISRTPEVTCVVVDVSHEDPEVKFNWYVDGV | |
| | EVHNAKTKPREEQYNSTYRVVSVLTVLHQDWLNGKEYKCKVSNK | |
| | ALPASIEKTISKAKGQPREPQVYTLPPCRKKLTKNQVSLTCLVKGF | |
| | YPSDIAVEWESNGQPENNYKTTPPVLKSDGSFFLYSKLTVDKSRW | |
| | QQGNVFSCSVMHEALHNHYTQKSLSLSPGK | |
| 491 | EVQLVESGGGLVQPGGSLRLSCAASGFTFSTYAMNWVRQAPGK | CD3scfv- |
| | GLEWVGRIRSKYNNYATYYADSVKGRFTISRDDSKNTLYLQMNSL | CD137.Bscfv- |
| | RAEDTAVYYCVRHGNFGDSYVSWFEYWGQGTLVTVSSGGGGSG | Fc |
| | GGGSGGGGSGGGGSQAVVTQEPSLTVSPGGTVTLTCGSSTGAV | |
| | TTSNYANWVQQKPGKSPRGLIGGTNKRAPGVPARFSGSLLGGKA | |
| | ALTISGAQPEDEADYYCALWYSNHWVFGGGTKLTVLSGGGGSQV | |
| | QLVQSGAEVKKPGASVKVSCKASGYTFSSYWMHWVRQAPGQRL | |
| | EWMGEINPGNGHTNYSQKFQGRVTITVDKSASTAYMELSSLRSED | |
| | TAVYYCARSFTTARAFAYWGQGTLVTVSSGKPGSGKPGSGKPGS | |
| | GKPGSDIVMTQSPPTLSLSPGERVTLSCRASQSISDYLHVVYQQKP | |
| | GQSPRLLIKYASQSISGIPARFSGSGSGTDFTLTISSLEPEDFAVYY | |
| | CQDGHSFPPTFGGGTKVEIKEPKSSDKTHTCPPCPAPEFEGGPSV | |
| | FLFPPKPKDTLMISRTPEVTCVVVDVSHEDPEVKFNWYVDGVEVH | |
| | NAKTKPREEQYNSTYRVVSVLTVLHQDWLNGKEYKCKVSNKALPA | |
| | SIEKTISKAKGQPREPQVYTLPPCRKKLTKNQVSLTCLVKGFYPSDI | |
| | AVEWESNGQPENNYKTTPPVLKSDGSFFLYSKLTVDKSRWQQGN | |
| | VFSCSVMHEALHNHYTQKSLSLSPGK | |
| 492 | QVQLVQSGAEVKKPGASVKVSCKASGYTFTNFGITWVRQAPGQG | CLDN182sc |
| | LEWMGEIYPSSGNTFYNEKFKGRVTMTTDTSTSTAYMELRSLRSD | fv-CD3scfv- |
| | DTAVYYCARGGGPLRSRYFDYWGQGTLVTVSSGGGGSGGGGSG | Fc |
| | GGGSGGGGSDIVMTQSPDSLAVSLGERATINCRSSQSLFSSGNQ | |
| | KNYLTWYQQKPGQPPKLLIYWASTRESGVPDRFSGSGSGTDFTLT | |
| | ISSLQAEDVAVYYCQNDYYYPLTFGGGTKVEIKSGGGGSEVQLVE | |
| | SGGGLVQPGGSLRLSCAASGFTFSTYAMNWVRQAPGKGLEWVG | |
| | RIRSKYNNYATYYADSVKGRFTISRDDSKNTLYLQMNSLRAEDTAV | |
| | YYCVRHGNFGDSYVSWFEYWGQGTLVTVSSGKPGSGKPGSGKP | |
| | GSGKPGSQAVVTQEPSLTVSPGGTVTLTCGSSTGAVTTSNYANW | |
| | VQQKPGKSPRGLIGGTNKRAPGVPARFSGSLLGGKAALTISGAQP | |
| | EDEADYYCALWYSNHWVFGGGTKLTVLEPKSSDKTHTCPPCPAP | |
| | EFEGGPSVFLFPPKPKDTLMISRTPEVTCVVVDVSHEDPEVKFNW | |
| | YVDGVEVHNAKTKPREEQYNSTYRVVSVLTVLHQDWLNGKEYKC | |
| | KVSNKALPASIEKTISKAKGQPREPQVYTLPPCRKKLTKNQVSLTC | |
| | LVKGFYPSDIAVEWESNGQPENNYKTTPPVLKSDGSFFLYSKLTV | |
| | DKSRWQQGNVFSCSVMHEALHNHYTQKSLSLSPGK | |
| 493 | QVQLVQSGAEVKKPGASVKVSCKASGYTFTNSGMNWVRQAPGQ | CLDN182sc |
| | GLEWMGWINTNTGEPTFAEEFRGRVTMTRDTSISTAYMELSRLRS | fv-CD3scfv- |
| | DDTAVYYCARYYYGNSFAYWGQGTLVTVSSGGGGSGGGGSGG | Fc |
| | GGSGGGGSDIVMTQSPDSLAVSLGERATINCKSSQSLLNSGNQKN | |
| | YLTWYQQKPGQPPKLLIYWASTRESGVPDRFSGSGSGTDFTLTIS | |
| | SLQAEDVAVYYCQNNYFYPLTFGGGTKVEIKSGGGGSEVQLVESG | |
| | GGLVQPGGSLRLSCAASGFTFSTYAMNWVRQAPGKGLEWVGRIR | |
| | SKYNNYATYYADSVKGRFTISRDDSKNTLYLQMNSLRAEDTAVYY | |
| | CVRHGNFGDSYVSWFEYWGQGTLVTVSSGKPGSGKPGSGKPGS | |
| | GKPGSQAVVTQEPSLTVSPGGTVTLTCGSSTGAVTTSNYANWVQ | |
| | QKPGKSPRGLIGGTNKRAPGVPARFSGSLLGGKAALTISGAQPED | |
| | EADYYCALWYSNHWVFGGGTKLTVLEPKSSDKTHTCPPCPAPEF | |
| | EGGPSVFLFPPKPKDTLMISRTPEVTCVVVDVSHEDPEVKFNWYV | |
| | DGVEVHNAKTKPREEQYNSTYRVVSVLTVLHQDWLNGKEYKCKV | |
| | SNKALPASIEKTISKAKGQPREPQVYTLPPCRKKLTKNQVSLTCLV | |
| | KGFYPSDIAVEWESNGQPENNYKTTPPVLKSDGSFFLYSKLTVDK | |
| | SRWQQGNVFSCSVMHEALHNHYTQKSLSLSPGK | |
| 494 | QVQLQQWGAGLLKPSETLSLTCAVYGGSFSGYYWSWIRQSPEKG | CD137.Ufab- |
| | LEWIGEINHGGYVTYNPSLESRVTISVDTSKNQFSLKLSSVTAADTA | Fc-- |
| | VYYCARDYGPGNYDVVYFDLWGRGTLVTVSSASTKGPSVFPLAPS | CD3scfv- |
| | SKSTSGGTAALGCLVKDYFPEPVTVSWNSGALTSGVHTFPAVLQS | DLL3scfv |
| | SGLYSLSSVVTVPSSSLGTQTYICNVNHKPSNTKVDKRVEPKSCD | |
| | KTHTCPPCPAPEFEGGPSVFLFPPKPKDTLMISRTPEVTCVVVDVS | |
| | HEDPEVKFNWYVDGVEVHNAKTKPREEQYNSTYRVVSVLTVLHQ | |
| | DWLNGKEYKCKVSNKALPASIEKTISKAKGQPREPQVYTLPPCRK | |
| | KLTKNQVSLTCLVKGFYPSDIAVEWESNGQPENNYKTTPPVLKSD | |
| | GSFFLYSKLTVDKSRWQQGNVFSCSVMHEALHNHYTQKSLSLSP | |
| | GKSGGGGSEVQLVESGGGLVQPGGSLRLSCAASGFTFSTYAMN | |
| | WVRQAPGKGLEWVGRIRSKYNNYATYYADSVKGRFTISRDDSKN | |
| | TLYLQMNSLRAEDTAVYYCVRHGNFGDSYVSWFEYWGQGTLVTV | |
| | SSGGGGSGGGGSGGGGSGGGGSQAVVTQEPSLTVSPGGTVTLT | |
| | CGSSTGAVTTSNYANWVQQKPGKSPRGLIGGTNKRAPGVPARFS | |
| | GSLLGGKAALTISGAQPEDEADYYCALWYSNHWVFGGGTKLTVLS | |
| | GGGGSQVQLVQSGAEVKKPGASVKVSCKASGYTFTDYFMNWVR | |
| | QAPGQGLEWMGVINPYNDITIYNQKFQGRVTMTVDRSTSTVYMEL | |
| | SSLRSEDTAVYYCAREGVLYDGYYEGAYWGQGTLVTVSSGGGGS | |
| | GGGGSGGGGSDIQLTQSPSFLSASVGDRVTITCKASQNVGIAVAW | |
| | YQQKPGKAPKLLIYAASNRYTGVPSRFSGSGSGTEFTLTISSLQPE | |
| | DFATYYCQQYSTYPYTFGQGTKLEIK | |
| 495 | QVQLVQSGAEVKKPGASVKVSCKASGYTFSSYWMHWVRQAPGQ | CD137.Bfab- |
| | RLEWMGEINPGNGHTNYSQKFQGRVTITVDKSASTAYMELSSLRS | Fc- |
| | EDTAVYYCARSFTTARAFAYWGQGTLVTVSSASTKGPSVFPLAPS | CD3scfv |
| | SKSTSGGTAALGCLVKDYFPEPVTVSWNSGALTSGVHTFPAVLQS | |
| | SGLYSLSSVVTVPSSSLGTQTYICNVNHKPSNTKVDKRVEPKSCD | |
| | KTHTCPPCPAPEFEGGPSVFLFPPKPKDTLMISRTPEVTCVVVDVS | |
| | HEDPEVKFNWYVDGVEVHNAKTKPREEQYNSTYRVVSVLTVLHQ | |
| | DWLNGKEYKCKVSNKALPASIEKTISKAKGQPREPQVCTLPPSRD | |
| | ELTKNQVSLTCLVEGFYPSDIAVEWESNGQPENNYKTTPPVLDSD | |
| | GSFFLYSDLTVDKSRWQQGNVFSCSVMHEALHNHYTQESLSLSP | |
| | GKSGGGGSEVQLVESGGGLVQPGGSLRLSCAASGFTFSTYAMN | |
| | WVRQAPGKGLEWVGRIRSKYNNYATYYADSVKGRFTISRDDSKN | |
| | TLYLQMNSLRAEDTAVYYCVRHGNFGDSYVSWFEYWGQGTLVTV | |
| | SSGGGGSGGGGSGGGGSGGGGSQAVVTQEPSLTVSPGGTVTLT | |
| | CGSSTGAVTTSNYANWVQQKPGKSPRGLIGGTNKRAPGVPARFS | |
| | GSLLGGKAALTISGAQPEDEADYYCALWYSNHWVFGGGTKLTVL | |
| 496 | QVQLVQSGAEVKKPGASVKVSCKASGYTFSSYWMHWVRQAPGQ | CD137.Bfab- |
| | RLEWMGEINPGNGHTNYSQKFQGRVTITVDKSASTAYMELSSLRS | Fc-- |
| | EDTAVYYCARSFTTARAFAYWGQGTLVTVSSASTKGPSVFPLAPS | CD3scfv- |
| | SKSTSGGTAALGCLVKDYFPEPVTVSWNSGALTSGVHTFPAVLQS | DLL3scfv |
| | SGLYSLSSVVTVPSSSLGTQTYICNVNHKPSNTKVDKRVEPKSCD | |
| | KTHTCPPCPAPEFEGGPSVFLFPPKPKDTLMISRTPEVTCVVVDVS | |
| | HEDPEVKFNWYVDGVEVHNAKTKPREEQYNSTYRVVSVLTVLHQ | |
| | DWLNGKEYKCKVSNKALPASIEKTISKAKGQPREPQVCTLPPSRD | |
| | ELTKNQVSLTCLVEGFYPSDIAVEWESNGQPENNYKTTPPVLDSD | |
| | GSFFLYSDLTVDKSRWQQGNVFSCSVMHEALHNHYTQESLSLSP | |
| | GKSGGGGSEVQLVESGGGLVQPGGSLRLSCAASGFTFSTYAMN | |
| | WVRQAPGKGLEWVGRIRSKYNNYATYYADSVKGRFTISRDDSKN | |
| | TLYLQMNSLRAEDTAVYYCVRHGNFGDSYVSWFEYWGQGTLVTV | |
| | SSGGGGSGGGGSGGGGSGGGGSQAVVTQEPSLTVSPGGTVTLT | |
| | CGSSTGAVTTSNYANWVQQKPGKSPRGLIGGTNKRAPGVPARFS | |
| | GSLLGGKAALTISGAQPEDEADYYCALWYSNHWVFGGGTKLTVLS | |
| | GGGGSQVQLVQSGAEVKKPGASVKVSCKASGYTFTDYFMNWVR | |
| | QAPGQGLEWMGVINPYNDITIYNQKFQGRVTMTVDRSTSTVYMEL | |
| | SSLRSEDTAVYYCAREGVLYDGYYEGAYWGQGTLVTVSSGGGGS | |
| | GGGGSGGGGSDIQLTQSPSFLSASVGDRVTITCKASQNVGIAVAW | |
| | YQQKPGKAPKLLIYAASNRYTGVPSRFSGSGSGTEFTLTISSLQPE | |
| | DFATYYCQQYSTYPYTFGQGTKLEIK | |
| 497 | QVQLVQSGAEVKKPGASVKVSCKASGYTFTDYFMNWVRQAPGQ | DLL3scfv- |
| | GLEWMGVINPYNDITIYNQKFQGRVTMTVDRSTSTVYMELSSLRS | CD3scfv- |
| | EDTAVYYCAREGVLYDGYYEGAYWGQGTLVTVSSGGGGSGGGG | Fc- |
| | SGGGGSDIQLTQSPSFLSASVGDRVTITCKASQNVGIAVAWYQQK | CD137.Bscfv |
| | PGKAPKLLIYAASNRYTGVPSRFSGSGSGTEFTLTISSLQPEDFAT | |
| | YYCQQYSTYPYTFGQGTKLEIKSGGGSEVQLVESGGGLVQPGGS | |
| | LRLSCAASGFTFSTYAMNWVRQAPGKGLEWVGRIRSKYNNYATY | |
| | YADSVKGRFTISRDDSKNTLYLQMNSLRAEDTAVYYCVRHGNFGD | |
| | SYVSWFEYWGQGTLVTVSSGKPGSGKPGSGKPGSGKPGSQAVV | |
| | TQEPSLTVSPGGTVTLTCGSSTGAVTTSNYANWVQQKPGKSPRG | |
| | LIGGTNKRAPGVPARFSGSLLGGKAALTISGAQPEDEADYYCALW | |
| | YSNHWVFGGGTKLTVLEPKSSDKTHTCPPCPAPEFEGGPSVFLFP | |
| | PKPKDTLMISRTPEVTCVVVDVSHEDPEVKFNWYVDGVEVHNAKT | |
| | KPREEQYNSTYRVVSVLTVLHQDWLNGKEYKCKVSNKALPASIEK | |
| | TISKAKGQPREPQVYTLPPCRKKLTKNQVSLTCLVKGFYPSDIAVE | |
| | WESNGQPENNYKTTPPVLKSDGSFFLYSKLTVDKSRWQQGNVFS | |
| | CSVMHEALHNHYTQKSLSLSPGKSGGGSQVQLVQSGAEVKKPGA | |
| | SVKVSCKASGYTFSSYWMHWVRQAPGQRLEWMGEINPGNGHTN | |
| | YSQKFQGRVTITVDKSASTAYMELSSLRSEDTAVYYCARSFTTARA | |
| | FAYWGQGTLVTVSSGKPGSGKPGSGKPGSGKPGSDIVMTQSPPT | |
| | LSLSPGERVTLSCRASQSISDYLHWYQQKPGQSPRLLIKYASQSIS | |
| | GIPARFSGSGSGTDFTLTISSLEPEDFAVYYCQDGHSFPPTFGGGT | |
| | KVEIK | |
| 498 | QVQLVQSGAEVKKPGASVKVSCKASGYTFTDYFMNWVRQAPGQ | DLL3Fab- |
| | GLEWMGVINPYNDITIYNQKFQGRVTMTVDRSTSTVYMELSSLRS | Fc- |
| | EDTAVYYCAREGVLYDGYYEGAYWGQGTLVTVSSASTKGPSVFP | CD137.Bscfv |
| | LAPSSKSTSGGTAALGCLVKDYFPEPVTVSWNSGALTSGVHTFPA | |
| | VLQSSGLYSLSSVVTVPSSSLGTQTYICNVNHKPSNTKVDKRVEPK | |
| | SCDKTHTCPPCPAPEFEGGPSVFLFPPKPKDTLMISRTPEVTCVVV | |
| | DVSHEDPEVKFNWYVDGVEVHNAKTKPREEQYNSTYRVVSVLTV | |
| | LHQDWLNGKEYKCKVSNKALPASIEKTISKAKGQPREPQVCTLPP | |
| | SRDELTKNQVSLTCLVEGFYPSDIAVEWESNGQPENNYKTTPPVL | |
| | DSDGSFFLYSDLTVDKSRWQQGNVFSCSVMHEALHNHYTQESLS | |
| | LSPGKSGGGSQVQLVQSGAEVKKPGASVKVSCKASGYTFSSYW | |
| | MHWVRQAPGQRLEWMGEINPGNGHTNYSQKFQGRVTITVDKSA | |
| | STAYMELSSLRSEDTAVYYCARSFTTARAFAYWGQGTLVTVSSGK | |
| | PGSGKPGSGKPGSGKPGSDIVMTQSPPTLSLSPGERVTLSCRAS | |
| | QSISDYLHWYQQKPGQSPRLLIKYASQSISGIPARFSGSGSGTDFT | |
| | LTISSLEPEDFAVYYCQDGHSFPPTFGGGTKVEIK | |
| 499 | QVQLVQSGAEVKKPGASVKVSCKASGYTFTDYFMNWVRQAPGQ | DLL3Fab- |
| | GLEWMGVINPYNDITIYNQKFQGRVTMTVDRSTSTVYMELSSLRS | Fc- |
| | EDTAVYYCAREGVLYDGYYEGAYWGQGTLVTVSSASTKGPSVFP | CD137.Bscfv- |
| | LAPSSKSTSGGTAALGCLVKDYFPEPVTVSWNSGALTSGVHTFPA | CD137.Bscfv |
| | VLQSSGLYSLSSVVTVPSSSLGTQTYICNVNHKPSNTKVDKRVEPK | |
| | SCDKTHTCPPCPAPEFEGGPSVFLFPPKPKDTLMISRTPEVTCVVV | |
| | DVSHEDPEVKFNWYVDGVEVHNAKTKPREEQYNSTYRVVSVLTV | |
| | LHQDWLNGKEYKCKVSNKALPASIEKTISKAKGQPREPQVCTLPP | |
| | SRDELTKNQVSLTCLVEGFYPSDIAVEWESNGQPENNYKTTPPVL | |
| | DSDGSFFLYSDLTVDKSRWQQGNVFSCSVMHEALHNHYTQESLS | |
| | LSPGKSGGGSQVQLVQSGAEVKKPGASVKVSCKASGYTFSSYW | |
| | MHWVRQAPGQRLEWMGEINPGNGHTNYSQKFQGRVTITVDKSA | |
| | STAYMELSSLRSEDTAVYYCARSFTTARAFAYWGQGTLVTVSSGK | |
| | PGSGKPGSGKPGSGKPGSDIVMTQSPPTLSLSPGERVTLSCRAS | |
| | QSISDYLHWYQQKPGQSPRLLIKYASQSISGIPARFSGSGSGTDFT | |
| | LTISSLEPEDFAVYYCQDGHSFPPTFGGGTKVEIKSGGGSQVQLV | |
| | QSGAEVKKPGASVKVSCKASGYTFSSYWMHWVRQAPGQRLEW | |
| | MGEINPGNGHTNYSQKFQGRVTITVDKSASTAYMELSSLRSEDTA | |
| | VYYCARSFTTARAFAYWGQGTLVTVSSGKPGSGKPGSGKPGSGK | |
| | PGSDIVMTQSPPTLSLSPGERVTLSCRASQSISDYLHWYQQKPGQ | |
| | SPRLLIKYASQSISGIPARFSGSGSGTDFTLTISSLEPEDFAVYYCQ | |
| | DGHSFPPTFGGGTKVEIK | |
| 500 | QVQLVQSGAEVKKPGASVKVSCKASGYTFTSYYIHWVRQAPGQG | CD28(C50S) |
| | LEWIGSIYPGNVNTNYNEKFKDRATLTVDTSISTAYMELSRLRSDD | scfv- |
| | TAVYFCTRSHYGLDWNFDVWGQGTTVTVSSGGGGSGGGGSGG | CD137.Bscfv- |
| | GGSGGGGSDIQMTQSPSSLSASVGDRVTITCHASQNIYVWLNWY | Fc |
| | QQKPGKAPKLLIYKASNLHTGVPSRFSGSGSGTDFTLTISSLQPED | |
| | FATYYCQQGQTYPYTFGGGTKVEIKSGGGGSQVQLVQSGAEVKK | |
| | PGASVKVSCKASGYTFSSYWMHWVRQAPGQRLEWMGEINPGNG | |
| | HTNYSQKFQGRVTITVDKSASTAYMELSSLRSEDTAVYYCARSFTT | |
| | ARAFAYWGQGTLVTVSSGKPGSGKPGSGKPGSGKPGSDIVMTQS | |
| | PPTLSLSPGERVTLSCRASQSISDYLHWYQQKPGQSPRLLIKYASQ | |
| | SISGIPARFSGSGSGTDFTLTISSLEPEDFAVYYCQDGHSFPPTFG | |
| | GGTKVEIKEPKSSDKTHTCPPCPAPEFEGGPSVFLFPPKPKDTLMI | |
| | SRTPEVTCVVVDVSHEDPEVKFNWYVDGVEVHNAKTKPREEQYN | |
| | STYRVVSVLTVLHQDWLNGKEYKCKVSNKALPASIEKTISKAKGQP | |
| | REPQVYTLPPCRKKLTKNQVSLTCLVKGFYPSDIAVEWESNGQPE | |
| | NNYKTTPPVLKSDGSFFLYSKLTVDKSRWQQGNVFSCSVMHEAL | |
| | HNHYTQKSLSLSPGK | |
| 501 | QVQLVQSGAEVKKPGASVKVSCKASGYTFTSYYIHWVRQAPGQG | CD28(C50S) |
| | LEWIGSIYPGNVNTNYNEKFKDRATLTVDTSISTAYMELSRLRSDD | scfv- |
| | TAVYFCTRSHYGLDWNFDVWGQGTTVTVSSGGGGSGGGGSGG | CD137.39scfv- |
| | GGSGGGGSDIQMTQSPSSLSASVGDRVTITCHASQNIYVWLNWY | Fc |
| | QQKPGKAPKLLIYKASNLHTGVPSRFSGSGSGTDFTLTISSLQPED | |
| | FATYYCQQGQTYPYTFGGGTKVEIKSGGGGSEVQLVESGGGLVQ | |
| | PGGSLRLSCAASGFTFSDYWMSWVRQAPGKGLEWVADIKNDGS | |
| | YTNYAPSLTNRFTISRDNAKNSLYLQMNSLRAEDTAVYYCARELTG | |
| | TWGQGTMVTVSSGKPGSGKPGSGKPGSGKPGSDIVMTQSPDSL | |
| | AVSLGERATINCKSSQSLLSSGNQKNYLAWYQQKPGQPPKLLIYY | |
| | ASTRQSGVPDRFSGSGSGTDFTLTISSLQAEDVAVYYCLQYDRYP | |
| | FTFGQGTKLEIKEPKSSDKTHTCPPCPAPEFEGGPSVFLFPPKPKD | |
| | TLMISRTPEVTCVVVDVSHEDPEVKFNWYVDGVEVHNAKTKPREE | |
| | QYNSTYRVVSVLTVLHQDWLNGKEYKCKVSNKALPASIEKTISKAK | |
| | GQPREPQVYTLPPCRKKLTKNQVSLTCLVKGFYPSDIAVEWESNG | |
| | QPENNYKTTPPVLKSDGSFFLYSKLTVDKSRWQQGNVFSCSVMH | |
| | EALHNHYTQKSLSLSPGK | |
| 502 | QVQLVQSGAEVKKPGASVKVSCKASGYTFSSYWMHWVRQAPGQ | CD137.Bscfv- |
| | RLEWMGEINPGNGHTNYSQKFQGRVTITVDKSASTAYMELSSLRS | CD28(C50S) |
| | EDTAVYYCARSFTTARAFAYWGQGTLVTVSSGGGGSGGGGSGG | scfv-Fc |
| | GGSGGGGSDIVMTQSPPTLSLSPGERVTLSCRASQSISDYLHWYQ | |
| | QKPGQSPRLLIKYASQSISGIPARFSGSGSGTDFTLTISSLEPEDFA | |
| | VYYCQDGHSFPPTFGGGTKVEIKSGGGGSQVQLVQSGAEVKKPG | |
| | ASVKVSCKASGYTFTSYYIHWVRQAPGQGLEWIGSIYPGNVNTNY | |
| | NEKFKDRATLTVDTSISTAYMELSRLRSDDTAVYFCTRSHYGLDW | |
| | NFDVWGQGTTVTVSSGKPGSGKPGSGKPGSGKPGSDIQMTQSP | |
| | SSLSASVGDRVTITCHASQNIYVWLNWYQQKPGKAPKWYKASNL | |
| | HTGVPSRFSGSGSGTDFTLTISSLQPEDFATYYCQQGQTYPYTFG | |
| | GGTKVEIKEPKSSDKTHTCPPCPAPEFEGGPSVFLFPPKPKDTLMI | |
| | SRTPEVTCVVVDVSHEDPEVKFNWYVDGVEVHNAKTKPREEQYN | |
| | STYRVVSVLTVLHQDWLNGKEYKCKVSNKALPASIEKTISKAKGQP | |
| | REPQVYTLPPCRKKLTKNQVSLTCLVKGFYPSDIAVEWESNGQPE | |
| | NNYKTTPPVLKSDGSFFLYSKLTVDKSRWQQGNVFSCSVMHEAL | |
| | HNHYTQKSLSLSPGK | |
| 503 | EVQLVESGGGLVQPGGSLRLSCAASGFTFSDYVVMSWVRQAPGK | CD137.39scfv- |
| | GLEWVADIKNDGSYTNYAPSLTNRFTISRDNAKNSLYLQMNSLRA | CD28(C50S) |
| | EDTAVYYCARELTGTWGQGTMVTVSSGGGGSGGGGSGGGGSG | scfv-Fc |
| | GGGSDIVMTQSPDSLAVSLGERATINCKSSQSLLSSGNQKNYLAW | |
| | YQQKPGQPPKLLIYYASTRQSGVPDRFSGSGSGTDFTLTISSLQAE | |
| | DVAVYYCLQYDRYPFTFGQGTKLEIKSGGGGSQVQLVQSGAEVK | |
| | KPGASVKVSCKASGYTFTSYYIHWVRQAPGQGLEWIGSIYPGNVN | |
| | TNYNEKFKDRATLTVDTSISTAYMELSRLRSDDTAVYFCTRSHYGL | |
| | DWNFDVWGQGTTVTVSSGKPGSGKPGSGKPGSGKPGSDIQMTQ | |
| | SPSSLSASVGDRVTITCHASQNIYVWLNWYQQKPGKAPKWYKAS | |
| | NLHTGVPSRFSGSGSGTDFTLTISSLQPEDFATYYCQQGQTYPYT | |
| | FGGGTKVEIKEPKSSDKTHTCPPCPAPEFEGGPSVFLFPPKPKDTL | |
| | MISRTPEVTCVVVDVSHEDPEVKFNWYVDGVEVHNAKTKPREEQ | |
| | YNSTYRVVSVLTVLHQDWLNGKEYKCKVSNKALPASIEKTISKAKG | |
| | QPREPQVYTLPPCRKKLTKNQVSLTCLVKGFYPSDIAVEWESNGQ | |
| | PENNYKTTPPVLKSDGSFFLYSKLTVDKSRWQQGNVFSCSVMHE | |
| | ALHNHYTQKSLSLSPGK | |

1. A trispecific molecule comprised of:
a) an anti-DLL3 antibody, an anti-Muc17 antibody or an anti-Cldn18.2 antibody;
b) a first antigen binding entity; and
c) a second antigen binding entity.

2. The trispecific molecule of claim 1, wherein the first antigen binding entity is comprised of an anti-CD28 scFv domain and the second antigen binding entity is comprised of an anti-CD3 Scfv-Fc domain.

3. The trispecific molecule of claim 1, wherein the first antigen binding entity and the second antigen binding entity form a heterodimer configuration.

4. The trispecific molecule of claim 1, comprised of SEQ. ID NO: 347, SEQ. ID NO: 276 and SEQ. ID NO: 297.

5. The trispecific molecule of claim 1, comprised of SEQ. ID NO: 430, SEQ. ID NO: 276 and SEQ. ID NO: 297.

6. The trispecific molecule of claim 1, comprised of SEQ. ID NO: 481, SEQ. ID NO: 406 and SEQ. ID NO: 413.

7. A method of stimulating T-cell activity comprised of a step of administering a therapeutic amount of the trispecific molecule of claim 1.

8. The trispecific molecule of claim 1, wherein:
a) the first antigen binding entity is a single chain fragment variable region (scFv),
b) the second antigen binding entity is a single chain fragment variable region (scFv), and
c) the anti-DLL3 antibody, anti-Muc17 antibody or anti-Cldn18.2 antibody is an antigen-binding fragment (Fab)—fragment crystallizable region (Fc region).

9. A trispecific molecule comprised of an antibody against DLL3 paired with a first agonist antibody and second agonist antibody,
wherein the first agonist antibody and second agonist antibody each activate one or more of CD3, CD28 and CD137.

10. A method of activating T-cell cytotoxicity against DLL3 expressing cells using the trispecific molecule of claim 9.

11. A method of treating cancer using the trispecific molecule of claim 9.

12. The method of claim 11, wherein the cancer is at least one of pancreatic, appendiceal and colon cancer.

13. The method of claim 10, wherein the trispecific molecule is administered with one or more checkpoint regulators.

14. The trispecific molecule of claim 9, further comprised of an immune checkpoint agonist or immune checkpoint antagonist.

15. A method of activating T-cell cytotoxicity against DLL3 expressing cells using the trispecific molecule of claim 14.

16. A method of treating cancer using the trispecific molecule of claim 14.

17. The method of claim 16, wherein the cancer is at least one of lung, pancreatic, appendiceal and colon cancer.

18. A trispecific antibody comprising:
a first targeting domain having a binding specificity to DLL3,
a second targeting domain having a binding specificity to a first cluster of differentiation receptor,
a third targeting domain having a binding specificity to a second cluster of differentiation receptor,
wherein the first targeting domain, the second targeting domain and the third targeting domain each comprises one or more antibody variable regions.

19. The trispecific antibody of claim 18, wherein the first cluster of differentiation receptor and the second cluster of differentiation receptor are each one of CD3, CD28 or CD137.

20. The trispecific antibody of claim 18, wherein the first targeting domain, the second targeting domain and the third targeting domain are each comprised at least one antibody fragment selected from the group consisting of single domain antibody (sdAb), a fragment variable (Fv) heterodimer, a single chain Fv (scFv), Fab fragment and combinations thereof.

The application's sequence listing, which the Patent Office published only in electronic form, follows.

SEQUENCE LISTING (503 sequences)

SEQ ID NO: 1 - protein, 10 aa, Artificial Sequence
  Description of Artificial Sequence: Synthetic peptide
DYIFSNYYIE

SEQ ID NO: 2 - protein, 10 aa, Artificial Sequence
  Description of Artificial Sequence: Synthetic peptide
DYTFSNYYIE

SEQ ID NO: 3 - protein, 5 aa, Artificial Sequence
  Description of Artificial Sequence: Synthetic peptide
DYYMN

SEQ ID NO: 4 - protein, 5 aa, Artificial Sequence
  Description of Artificial Sequence: Synthetic peptide
DYYVN

SEQ ID NO: 5 - protein, 10 aa, Artificial Sequence
  Description of Artificial Sequence: Synthetic peptide
GFTFSNYGMH

SEQ ID NO: 6 - protein, 10 aa, Artificial Sequence
  Description of Artificial Sequence: Synthetic peptide
GFTFSSYGMH

SEQ ID NO: 7 - protein, 10 aa, Artificial Sequence
  Description of Artificial Sequence: Synthetic peptide
GFTFSSYGMH

SEQ ID NO: 8 - protein, 6 aa, Artificial Sequence
  Description of Artificial Sequence: Synthetic peptide
SAYYWN

SEQ ID NO: 9 - protein, 5 aa, Artificial Sequence
  Description of Artificial Sequence: Synthetic peptide
SYYWS

SEQ ID NO: 10 - protein, 17 aa, Artificial Sequence
  Description of Artificial Sequence: Synthetic peptide
EILPGNGNTVYNEKFKD

SEQ ID NO: 11 - protein, 17 aa, Artificial Sequence
  Description of Artificial Sequence: Synthetic peptide
EILPGTGNTVYNEKFKD

SEQ ID NO: 12 - protein, 17 aa, Artificial Sequence
  Description of Artificial Sequence: Synthetic peptide
IISPNDGGTNYNQKFKG

SEQ ID NO: 13 - protein, 17 aa, Artificial Sequence
  Description of Artificial Sequence: Synthetic peptide
VINPDNGITTYNQKFKG

SEQ ID NO: 14 - protein, 17 aa, Artificial Sequence
  Description of Artificial Sequence: Synthetic peptide
VINPYNDITIYNQKFQG

SEQ ID NO: 15 - protein, 17 aa, Artificial Sequence
  Description of Artificial Sequence: Synthetic peptide
VISGSGSSKYYADSVKG

SEQ ID NO: 16 - protein, 17 aa, Artificial Sequence
  Description of Artificial Sequence: Synthetic peptide
VISHHGSSKYYADSVKG

SEQ ID NO: 17 - protein, 17 aa, Artificial Sequence
  Description of Artificial Sequence: Synthetic peptide
VISHHGSSKYYARSVKG

SEQ ID NO: 18 - protein, 17 aa, Artificial Sequence
  Description of Artificial Sequence: Synthetic peptide
VISYDGSSKYYADSVKG

SEQ ID NO: 19 - protein, 16 aa, Artificial Sequence
  Description of Artificial Sequence: Synthetic peptide
YISDVGHNYYNPSLKN

SEQ ID NO: 20 - protein, 16 aa, Artificial Sequence
  Description of Artificial Sequence: Synthetic peptide
YISDVGSNNYNPSLKN

SEQ ID NO: 21 - protein, 16 aa, Artificial Sequence
  Description of Artificial Sequence: Synthetic peptide
YVYYSGTTNYNPSLKS

SEQ ID NO: 22 - protein, 9 aa, Artificial Sequence
  Description of Artificial Sequence: Synthetic peptide
WGDYALFAN

SEQ ID NO: 23 - protein, 6 aa, Artificial Sequence
  Description of Artificial Sequence: Synthetic peptide
DQVFAY

SEQ ID NO: 24 - protein, 9 aa, Artificial Sequence
  Description of Artificial Sequence: Synthetic peptide
DWFFYLFDY

SEQ ID NO: 25 - protein, 9 aa, Artificial Sequence
  Description of Artificial Sequence: Synthetic peptide
DWFYFIFDY

SEQ ID NO: 26 - protein, 9 aa, Artificial Sequence
  Description of Artificial Sequence: Synthetic peptide
DWWELVFDY

SEQ ID NO: 27 - protein, 13 aa, Artificial Sequence
  Description of Artificial Sequence: Synthetic peptide
EGVLYDGYYEGAY

SEQ ID NO: 28 - protein, 11 aa, Artificial Sequence
  Description of Artificial Sequence: Synthetic peptide
GVWNYERSFDY

SEQ ID NO: 29 - protein, 11 aa, Artificial Sequence
  Description of Artificial Sequence: Synthetic peptide
SIAVTGFYFDY

SEQ ID NO: 30 - protein, 10 aa, Artificial Sequence
  Description of Artificial Sequence: Synthetic peptide
SASSSVSYMH

SEQ ID NO: 31 - protein, 11 aa, Artificial Sequence
  Description of Artificial Sequence: Synthetic peptide
KASQNVGIAVA

SEQ ID NO: 32 - protein, 11 aa, Artificial Sequence
  Description of Artificial Sequence: Synthetic peptide
KASQNVGTNVA

SEQ ID NO: 33 - protein, 16 aa, Artificial Sequence
  Description of Artificial Sequence: Synthetic peptide
KSSQSLLHSDAKTFLY

SEQ ID NO: 34 - protein, 16 aa, Artificial Sequence
  Description of Artificial Sequence: Synthetic peptide
KSSQSLLHSDGKTFLY

SEQ ID NO: 35 - protein, 15 aa, Artificial Sequence
  Description of Artificial Sequence: Synthetic peptide
RASESVHSYGNSLIH

SEQ ID NO: 36 - protein, 16 aa, Artificial Sequence
  Description of Artificial Sequence: Synthetic peptide
RSSKSLLHSNGITYLY

SEQ ID NO: 37 - protein, 16 aa, Artificial Sequence
  Description of Artificial Sequence: Synthetic peptide
RSSQSLLHSDAKTFLD

SEQ ID NO: 38 - protein, 16 aa, Artificial Sequence
  Description of Artificial Sequence: Synthetic peptide
RSSQSLLHSDGKTFLD

SEQ ID NO: 39 - protein, 7 aa, Artificial Sequence
  Description of Artificial Sequence: Synthetic peptide
SASYRYS

SEQ ID NO: 40 - protein, 7 aa, Artificial Sequence
  Description of Artificial Sequence: Synthetic peptide
AASNRYT

SEQ ID NO: 41 - protein, 7 aa, Artificial Sequence
  Description of Artificial Sequence: Synthetic peptide
DTSKLAS

SEQ ID NO: 42 - protein, 7 aa, Artificial Sequence
  Description of Artificial Sequence: Synthetic peptide
EVSNRAS

SEQ ID NO: 43 - protein, 7 aa, Artificial Sequence
  Description of Artificial Sequence: Synthetic peptide
EVSNRFS

SEQ ID NO: 44 - protein, 7 aa, Artificial Sequence
  Description of Artificial Sequence: Synthetic peptide
QMSNLAS

SEQ ID NO: 45 - protein, 7 aa, Artificial Sequence
  Description of Artificial Sequence: Synthetic peptide
RASNLES

SEQ ID NO: 46 - protein, 7 aa, Artificial Sequence
  Description of Artificial Sequence: Synthetic peptide
SASYRYS

SEQ ID NO: 47 - protein, 9 aa, Artificial Sequence
  Description of Artificial Sequence: Synthetic peptide
QQYSTYPYT

SEQ ID NO: 48 - protein, 7 aa, Artificial Sequence
  Description of Artificial Sequence: Synthetic peptide
AQNLELP

SEQ ID NO: 49 - protein, 9 aa, Artificial Sequence
  Description of Artificial Sequence: Synthetic peptide
LQGERLPFT

SEQ ID NO: 50 - protein, 9 aa, Artificial Sequence
  Description of Artificial Sequence: Synthetic peptide
LQGIHLPFT

SEQ ID NO: 51 - protein, 9 aa, Artificial Sequence
  Description of Artificial Sequence: Synthetic peptide
LQGRELPFT

SEQ ID NO: 52 - protein, 7 aa, Artificial Sequence
  Description of Artificial Sequence: Synthetic peptide
QQTNEDP

SEQ ID NO: 53 - protein, 9 aa, Artificial Sequence
  Description of Artificial Sequence: Synthetic peptide
QQWSSNPLT

SEQ ID NO: 54 - protein, 9 aa, Artificial Sequence
  Description of Artificial Sequence: Synthetic peptide
QQYNNYPLT

SEQ ID NO: 55 - protein, 9 aa, Artificial Sequence
  Description of Artificial Sequence: Synthetic peptide
QQYNSYPFT

SEQ ID NO: 56 - protein, 118 aa, Artificial Sequence
  Description of Artificial Sequence: Synthetic polypeptide
EVQLLESGGGLVQPGGSLRLSCAASGFTFSSYGMHWVRQAPGKGLEWVAVISGSGSSKYYADSVKGRFTISRDNSKNTLYLQMNSLRAEDTAVYYCARDWFFYLFDYWGQGTLVTVSS

SEQ ID NO: 57 - protein, 118 aa, Artificial Sequence
  Description of Artificial Sequence: Synthetic polypeptide
EVQLLESGGGLVQPGGSLRLSCAASGFTFSSYGMHWVRQAPGKGLEWVAVISGSGSSKYYADSVKGRFTISRDNSKNTLYLQMNSLRAEDTAVYYCARDWFYFIFDYWGQGTLVTVSS

SEQ ID NO: 58 - protein, 118 aa, Artificial Sequence
  Description of Artificial Sequence: Synthetic polypeptide
EVQLLESGGGLVQPGGSLRLSCAASGFTFSSYGMHWVRQAPGKGLEWVAVISHHGSSKYYADSVKGRFTISRDNSKNTLYLQMNSLRAEDTAVYYCARDWFFYLFDYWGQGTLVTVSS

SEQ ID NO: 59 - protein, 118 aa, Artificial Sequence
  Description of Artificial Sequence: Synthetic polypeptide
EVQLLESGGGLVQPGGSLRLSCAASGFTFSSYGMHWVRQAPGKGLEWVAVISHHGSSKYYADSVKGRFTISRDNSKNTLYLQMNSLRAEDTAVYYCARDWFYFIFDYWGQGTLVTVSS

SEQ ID NO: 60 - protein, 118 aa, Artificial Sequence
  Description of Artificial Sequence: Synthetic polypeptide
EVQLLESGGGLVQPGGSLRLSCAASGFTFSSYGMHWVRQAPGKGLEWVAVISYDGSSKYYADSVKGRFTISRDNSKNTLYLQMNSLRAEDTAVYYCARDWFFYLFDYWGQGTLVTVSS

SEQ ID NO: 61 - protein, 118 aa, Artificial Sequence
  Description of Artificial Sequence: Synthetic polypeptide
EVQLLESGGGLVQPGGSLRLSCAASGFTFSSYGMHWVRQAPGKGLEWVAVISYDGSSKYYADSVKGRFTISRDNSKNTLYLQMNSLRAEDTAVYYCARDWFYFIFDYWGQGTLVTVSS

SEQ ID NO: 62 - protein, 118 aa, Artificial Sequence
  Description of Artificial Sequence: Synthetic polypeptide
EVQLLESGGGLVQPGGSLRLSCAASGFTFSSYGMHWVRQAPGKGLEWVSVISHHGSSKYYADSVKGRFTISRDNSKNTLYLQMNSLRAEDTAVYYCAKDWFFYLFDYWGQGTLVTVSS

SEQ ID NO: 63 - protein, 118 aa, Artificial Sequence
  Description of Artificial Sequence: Synthetic polypeptide
EVQLLESGGGLVQPGGSLRLSCAASGFTFSSYGMHWVRQAPGKGLEWVSVISHHGSSKYYADSVKGRFTISRDNSKNTLYLQMNSLRAEDTAVYYCAKDWFYFIFDYWGQGTLVTVSS

SEQ ID NO: 64 - protein, 120 aa, Artificial Sequence
  Description of Artificial Sequence: Synthetic polypeptide
EVQLQQSGPVLVKPGASVKMSCKASGFTFTDYYMNWVKQSHGKSLEWIGVINPDNGITTYNQKFKGKATLTVDKSSSTAYMELNGLTSEDSAVYYCARGVWNYERSFDYWGQGTTLTVSS

SEQ ID NO: 65 - protein, 118 aa, Artificial Sequence
  Description of Artificial Sequence: Synthetic polypeptide
EVQLVESGGGLVQPGGSLRLSCAASGFTFSNYGMHWVRQAPGKGLEWVAVISHHGSSKYYADSVKGRYTISRDNSKNTLYLQMNSLRAEDTAVYYCARDWFFYLFDYWGQGTLVTVSS

SEQ ID NO: 66 - protein, 118 aa, Artificial Sequence
  Description of Artificial Sequence: Synthetic polypeptide
QVQLQESGPGLVKPSETLSLTCTVSGGSISSYYWSWIRQPPGKGLEWIGYVYYSGTTNYNPSLKSRVTISVDTSKNQFSLKLSSVTAADTAVYYCASIAVTGFYFDYWGQGTLVTVSS

SEQ ID NO: 67 - protein, 119 aa, Artificial Sequence
  Description of Artificial Sequence: Synthetic polypeptide
QVQLQQSGPVLVKPGASVKMSCKASGYSFTDYYVNWVKQSHGKSLEWIGIISPNDGGTNYNQKFKGKATLTVDKSSSTAYMEVNSLTSEDSAVYYCARDDDLGWYFDVWGTGTTVTVSS

SEQ ID NO: 68 - protein, 118 aa, Artificial Sequence
  Description of Artificial Sequence: Synthetic polypeptide
QVQLVESGGGAVQPGRSLRLSCAASGFTFSNYGMHWVRQAPGKGLEWVAVISHHGSSKYYARSVKGRFTISRDNSKNTLYLEMNSLRAEDTAVYYCARDWWELVFDYWGQGTLVTVSS

SEQ ID NO: 69 - protein, 118 aa, Artificial Sequence
  Description of Artificial Sequence: Synthetic polypeptide
QVQLVESGGGVVQPGRSLRLSCAASGFTFSNYGMHWVRQAPGKGLEWVAVISHHGSSKYYADSVKGRFTISRDNSKNTLYLQMNSLRAEDTAVYYCARDWFFYLFDYWGQGTLVTVSS

SEQ ID NO: 70 - protein, 118 aa, Artificial Sequence
  Description of Artificial Sequence: Synthetic polypeptide
QVQLVESGGGVVQPGRSLRLSCAASGFTFSNYGMHWVRQAPGKGLEWVAVISHHGSSKYYADSVKGRFTISRDNSKNTLYLQMNSLRAEDTAVYYCARDWFYFIFDYWGQGTLVTVSS

SEQ ID NO: 71 - protein, 118 aa, Artificial Sequence
  Description of Artificial Sequence: Synthetic polypeptide
QVQLVQSGAEVKKPGASVKVSCKASDYTFSNYYIEWVRQAPGQGLEWMGEILPGNGNTVYNEKFKDRVTMTVDTSTSTAYMELRSLRSDDTAVYYCARWGDYALFANWGQGTLVTVSS

SEQ ID NO: 72 - protein, 122 aa, Artificial Sequence
  Description of Artificial Sequence: Synthetic polypeptide
QVQLVQSGAEVKKPGASVKVSCKASGYTFTDYFMNWVRQAPGQGLEWMGVINPYNDITIYNQKFQGRVTMTVDRSTSTVYMELSSLRSEDTAVYYCAREGVLYDGYYEGAYWGQGTLVTVSS

SEQ ID NO: 73 - protein, 118 aa, Artificial Sequence
  Description of Artificial Sequence: Synthetic polypeptide
QVQLVQSGAEVKKPGASVKVSCKATDYIFSNYYIEWVRQAPGQGLEWMGEILPGTGNTVYNEKFKDRVTMTVDTSTSTVYMELSSLRSEDTAVYYCARWGDYALFANWGQGTLVTVSS

SEQ ID NO: 74 - protein, 116 aa, Artificial Sequence
  Description of Artificial Sequence: Synthetic polypeptide
SDVQLQESGPGLVKPSQSLSLTCSVTGYSITSAYYWNWIRQFPGNKLEWMGYISDVGHNYYNPSLKNRISITRDTSKNQFFLKLNSVTPEDTATYYCARDQVFAYWGQGTLVTVSA

SEQ ID NO: 75 - protein, 115 aa, Artificial Sequence
  Description of Artificial Sequence: Synthetic polypeptide
SDVQLQESGPGLVKPSQSLSLTCSVTGYSITSAYYWNWIRQFPGNKLEWMGYISDVGSNNYNPSLKNRISITRDTFKNQFFLKLNSVTTEDTATYFCTRDQVFAYWGQGTLVTVS

SEQ ID NO: 76 - protein, 107 aa, Artificial Sequence
  Description of Artificial Sequence: Synthetic polypeptide
DIQLTQSPSFLSASVGDRVTITCKASQNVGIAVAWYQQKPGKAPKLLIYAASNRYTGVPSRFSGSGSGTEFTLTISSLQPEDFATYYCQQYSTYPYTFGQGTKLEIK

SEQ ID NO: 77 - protein, 107 aa, Artificial Sequence
  Description of Artificial Sequence: Synthetic polypeptide
DIQMTQSPSFLSASVGDRVTITCKASQNVGTNVAWYQQKPGKAPKPLIYSTSYRYSGVPSRFSGSGSGTEFTLTISSLQPEDFATYYCQQYNNYPLTFGGGTKVEIK

SEQ ID NO: 78 - protein, 112 aa, Artificial Sequence
  Description of Artificial Sequence: Synthetic polypeptide
DIQMTQSPSSLSASVGDRVTITCKSSQSLLHSDAKTFLYWYQQKPGKAPKLLIYEVSNRFSGVPSRFSGSGSGTDFTLTISSLQPEDFATYYCLQGERLPFTFGQGTKVEIK

SEQ ID NO: 79 - protein, 107 aa, Artificial Sequence
  Description of Artificial Sequence: Synthetic polypeptide
DIQMTQSPSTLSASVGDRVTITCKASQNVGTNVAWYQQKPGKAPKALIYSASYRYSGVPSRFSGSGSGTEFTLTISSLQPDDFATYYCQQYNSYPFTFGQGTKLEIK

SEQ ID NO: 80 - protein, 112 aa, Artificial Sequence
  Description of Artificial Sequence: Synthetic polypeptide
DIVMTQAAFSNPVTVGTSASISCRSSKSLLHSNGITYLYWYLQKPGQSPQLLIYQMSNLASGVPDRFSSSGSGTDFTLRISRVEAEDVGVYYCAQNLELPWTFGGGTKLEIK

SEQ ID NO: 81 - protein, 107 aa, Artificial Sequence
  Description of Artificial Sequence: Synthetic polypeptide
DIVMTQSPKFMSTSVGDRVSVTCKASQNVGTNVAWYQQKPGQSPKALIYSASYRYSGVPDRFTGSGSGTDFTLTFSSVQSEDLAEYFCQQYNNYPLTFGGGTKLEIK

SEQ ID NO: 82 - protein, 112 aa, Artificial Sequence
  Description of Artificial Sequence: Synthetic polypeptide
DIVMTQSPLSLPVTPGEPASISCKSSQSLLHSDAKTFLYWYLQKPGQSPQLLIYEVSNRFSGVPDRFSGSGSGTDFTLKISRVEAEDVGVYYCLQGRELPFTFGQGTKVEIK

SEQ ID NO: 83 - protein, 112 aa, Artificial Sequence
  Description of Artificial Sequence: Synthetic polypeptide
DIVMTQSPLSLPVTPGEPASISCKSSQSLLHSDGKTFLYWYLQKPGQSPQLLIYEVSNRFSGVPDRFSGSGSGTDFTLKISRVEAEDVGVYYCLQGERLPFTFGQGTKVEIK

SEQ ID NO: 84 - protein, 112 aa, Artificial Sequence
  Description of Artificial Sequence: Synthetic polypeptide
DIVMTQSPLSLPVTPGEPASISCRSSQSLLHSDAKTFLDWYLQKPGQSPQLLIYEVSNRASGVPDRFSGSGSGTDFTLKISRVEAEDVGVYYCLQGRELPFTFGQGTKVEIK

SEQ ID NO: 85 - protein, 112 aa, Artificial Sequence
  Description of Artificial Sequence: Synthetic polypeptide
DIVMTQSPLSLPVTPGEPASISCRSSQSLLHSDGKTFLDWYLQKPGQSPQLLIYEVSNRASGVPDRFSGSGSGTDFTLKISRVEAEDVGVYYCLQGERLPFTFGQGTKVEIK

SEQ ID NO: 86 - protein, 112 aa, Artificial Sequence
  Description of Artificial Sequence: Synthetic polypeptide
DIVMTQTPLSLSVTPGQPASISCKSSQSLLHSDAKTFLYWYLQKPGQPPQLLIYEVSNRFSGVPDRFSGSGSGTDFTLKISRVEAEDVGVYYCLQGRELPFTFGPGTKVEIK

SEQ ID NO: 87 - protein, 112 aa, Artificial Sequence
  Description of Artificial Sequence: Synthetic polypeptide
DIVMTQTPLSLSVTPGQPASISCKSSQSLLHSDGKTFLYWYLQKPGQPPQLLIYEVSNRFSGVPDRFSGSGSGTDFTLKISRVEAEDVGVYYCLQGERLPFTFGPGTKVEIK

SEQ ID NO: 88 - protein, 112 aa, Artificial Sequence
  Description of Artificial Sequence: Synthetic polypeptide
DIVMTQTPLSLSVTPGQPASISCKSSQSLLHSDGKTFLYWYLQKPGQPPQLLIYEVSNRFSGVPDRFSGSGSGTDFTLKISRVEAEDVGVYYCLQGIHLPFTFGPGTKVEIK

SEQ ID NO: 89 - protein, 111 aa, Artificial Sequence
  Description of Artificial Sequence: Synthetic polypeptide
DTVLTQSPASLAVSLGQRATISCRASESVHSYGNSLIHWYQQKPGQPPRLLIYRASNLESGIPARFSGSGSRTDFTLTINPVEADDVATYYCQQTNEDPLTFGAGTKLELK

SEQ ID NO: 90 - protein, 108 aa, Artificial Sequence
  Description of Artificial Sequence: Synthetic polypeptide
EIVLTQSPGTLSLSPGERVTLSCRASQRVNNNYLAWYQQRPGQAPRLLIYGASSRATGIPDRFSGSGSGTDFTLTISRLEPEDFAVYYCQQYDRSPLTFGGGTKLEIK

SEQ ID NO: 91 - protein, 106 aa, Artificial Sequence
  Description of Artificial Sequence: Synthetic polypeptide
QIVLTQSPAIMSASPGEKVTMTCSASSSVSYMHWYQQKSGTSPKRWIYDTSKLASGVPARFSGSGSGTSYSLTISSMEAEDAATYYCQQWSSNPLTFGAGTKLELK

SEQ ID NO: 92 - protein, 10 aa, Artificial Sequence
  Description of Artificial Sequence: Synthetic peptide
GFTFSSFGMH

SEQ ID NO: 93 - protein, 10 aa, Artificial Sequence
  Description of Artificial Sequence: Synthetic peptide
GYAFSDYWIN

SEQ ID NO: 94 - protein, 10 aa, Artificial Sequence
  Description of Artificial Sequence: Synthetic peptide
GYEFSSHWMN

SEQ ID NO: 95 - protein, 10 aa, Artificial Sequence
  Description of Artificial Sequence: Synthetic peptide
GYIFSNHWMN

SEQ ID NO: 96 - protein, 10 aa, Artificial Sequence
  Description of Artificial Sequence: Synthetic peptide
GYTFTSYWLN

SEQ ID NO: 97 - protein, 10 aa, Artificial Sequence
  Description of Artificial Sequence: Synthetic peptide
GYTFTSYWMN

SEQ ID NO: 98 - protein, 10 aa, Artificial Sequence
  Description of Artificial Sequence: Synthetic peptide
GYTFTSYWMN

SEQ ID NO: 99 - protein, 17 aa, Artificial Sequence
  Description of Artificial Sequence: Synthetic peptide
MIHPSDSESRLNQKFKD

SEQ ID NO: 100 - protein, 17 aa, Artificial Sequence
  Description of Artificial Sequence: Synthetic peptide
MIHPSDSETRLNQEFKD

SEQ ID NO: 101 - protein, 17 aa, Artificial Sequence
  Description of Artificial Sequence: Synthetic peptide
MIHPSDSETRLNQKFKD

SEQ ID NO: 102 - protein, 17 aa, Artificial Sequence
  Description of Artificial Sequence: Synthetic peptide
MIHPSDSETRLNQKFTD

SEQ ID NO: 103 - protein, 17 aa, Artificial Sequence
  Description of Artificial Sequence: Synthetic peptide
QIYPGDGDINYNEKFRG

SEQ ID NO: 104 - protein, 17 aa, Artificial Sequence
  Description of Artificial Sequence: Synthetic peptide
QIYPGDGDINYNGKFRG

SEQ ID NO: 105 - protein, 17 aa, Artificial Sequence
  Description of Artificial Sequence: Synthetic peptide
QVYPGDDDINYNGKFRG

SEQ ID NO: 106 - protein, 17 aa, Artificial Sequence
  Description of Artificial Sequence: Synthetic peptide
YISSGSSTIYYADTVKG

SEQ ID NO: 107 - protein, 8 aa, Artificial Sequence
  Description of Artificial Sequence: Synthetic peptide
HGNYVMDY

SEQ ID NO: 108 - protein, 8 aa, Artificial Sequence
  Description of Artificial Sequence: Synthetic peptide
HGNYVMDY

SEQ ID NO: 109 - protein, 12 aa, Artificial Sequence
  Description of Artificial Sequence: Synthetic peptide
QGIITSVQEFAY

SEQ ID NO: 110 - protein, 12 aa, Artificial Sequence
  Description of Artificial Sequence: Synthetic peptide
QGVITSVQEFAY

SEQ ID NO: 111 - protein, 11 aa, Artificial Sequence
  Description of Artificial Sequence: Synthetic peptide
WGYYGSSYFAY

SEQ ID NO: 112 - protein, 8 aa, Artificial Sequence
  Description of Artificial Sequence: Synthetic peptide
HGNYLMDY

SEQ ID NO: 113 - protein, 10 aa, Artificial Sequence
  Description of Artificial Sequence: Synthetic peptide
SASSSLNYIY

SEQ ID NO: 114 - protein, 10 aa, Artificial Sequence
  Description of Artificial Sequence: Synthetic peptide
SASSSVNYIF

SEQ ID NO: 115 - protein, 10 aa, Artificial Sequence
  Description of Artificial Sequence: Synthetic peptide
SASSSVNYIY

SEQ ID NO: 116 - protein, 10 aa, Artificial Sequence
  Description of Artificial Sequence: Synthetic peptide
SASSSVSYMF

SEQ ID NO: 117 - protein, 10 aa, Artificial Sequence
  Description of Artificial Sequence: Synthetic peptide
SVSSNVDYVF

SEQ ID NO: 118 - protein, 11 aa, Artificial Sequence
  Description of Artificial Sequence: Synthetic peptide
KASEDIYNRLA

SEQ ID NO: 119 - protein, 7 aa, Artificial Sequence
  Description of Artificial Sequence: Synthetic peptide
RTSNLAS

SEQ ID NO: 120 - protein, 7 aa, Artificial Sequence
  Description of Artificial Sequence: Synthetic peptide
RTSNLAT

SEQ ID NO: 121 - protein, 7 aa, Artificial Sequence
  Description of Artificial Sequence: Synthetic peptide
GATNLET

SEQ ID NO: 122 - protein, 9 aa, Artificial Sequence
  Description of Artificial Sequence: Synthetic peptide
QQFHDYPRT

SEQ ID NO: 123 - protein, 9 aa, Artificial Sequence
  Description of Artificial Sequence: Synthetic peptide
QQFHSYPRT

SEQ ID NO: 124 - protein, 9 aa, Artificial Sequence
  Description of Artificial Sequence: Synthetic peptide
QQFWRTPPT

SEQ ID NO: 125 - protein, 9 aa, Artificial Sequence
  Description of Artificial Sequence: Synthetic peptide
QQYHSYPLT

SEQ ID NO: 126 - protein, 10 aa, Artificial Sequence
  Description of Artificial Sequence: Synthetic peptide
CQQFWRTPPT

SEQ ID NO: 127 - protein, 117 aa, Artificial Sequence
  Description of Artificial Sequence: Synthetic polypeptide
EVQLVQSGAEVKKPGESLKISCKGSGYEFSSHWMNWVRQMPGKGLEWMGQIYPGDGDINYNEKFRGQVTISADKSISTAYLQWSSLKASDTAMYYCARHGNYVMDYWGQGTLVTVSS

SEQ ID NO: 128 - protein, 121 aa, Artificial Sequence
  Description of Artificial Sequence: Synthetic polypeptide
QVQLVQSGAEVKKPGSSVKVSCKASGYTFTSYWLNWVRQAPGQGLEWMGMIHPSDSESRLNQKFKDRVTITADKSTSTAYMELSSLRSEDTAVYYCARQGIITSVQEFAYWGQGTLVTVSS

SEQ ID NO: 129 - protein, 117 aa, Artificial Sequence
  Description of Artificial Sequence: Synthetic polypeptide
QVQLVQSGAEVKKPGASVKVSCKASGYEFSSHWMNWVRQAPGQGLEWMGQIYPGDGDINYNEKFRGRVTMTRDTSTSTVYMELSSLRSEDTAVYYCARHGNYVMDYWGQGTLVTVSS

SEQ ID NO: 130 - protein, 121 aa, Artificial Sequence
  Description of Artificial Sequence: Synthetic polypeptide
QVQLVQSGAEVKKPGASVKVSCKASGYTFTSYWMNWVRQAPGQGLEWIGMIHPSDSETRLNQKFKDRVTLTVDKSSSTAYMELSSLRSEDTAVYYCARQGIITSVQEFAYWGQGTLVTVSS

SEQ ID NO: 131 - protein, 121 aa, Artificial Sequence
  Description of Artificial Sequence: Synthetic polypeptide
QVQLVQSGAEVKKPGASVKVSCKASGYTFTSYWMNWVRQAPGQGLEWMGMIHPSDSETRLNQEFKDRVTMTRDTSTSTVYMELSSLRSEDTAVYYCARQGVITSVQEFAYWGQGTLVTVSS

SEQ ID NO: 132 - protein, 121 aa, Artificial Sequence
  Description of Artificial Sequence: Synthetic polypeptide
QVQLVQSGAEVKKPGASVKVSCKASGYTFTSYWMNWVRQAPGQGLEWMGMIHPSDSETRLNQKFKDRVTLTRDKSISTAYMELSRLRSDDTAVYYCARQGIITSVQEFAYWGQGTLVTVSS

SEQ ID NO: 133 - protein, 121 aa, Artificial Sequence
  Description of Artificial Sequence: Synthetic polypeptide
QVQLVQSGAEVKKPGASVKVSCKASGYTFTSYWMNWVRQAPGQGLEWMGMIHPSDSETRLNQKFKDRVTLTVDKSISTAYMELSRLRSDDTAVYYCARQGIITSVQEFAYWGQGTLVTVSS

SEQ ID NO: 134 - protein, 121 aa, Artificial Sequence
  Description of Artificial Sequence: Synthetic polypeptide
QVQLVQSGAEVKKPGASVKVSCKASGYTFTSYWMNWVRQAPGQGLEWMGMIHPSDSETRLNQKFKDRVTLTVDTSISTAYMELSRLRSDDTAVYYCARQGIITSVQEFAYWGQGTLVTVSS

SEQ ID NO: 135 - protein, 121 aa, Artificial Sequence
  Description of Artificial Sequence: Synthetic polypeptide
QVQLVQSGAEVKKPGASVKVSCKASGYTFTSYWMNWVRQAPGQGLEWMGMIHPSDSETRLNQKFKDRVTMTRDTSISTAYMELSRLRSDDTAVYYCARQGIITSVQEFAYWGQGTLVTVSS

SEQ ID NO: 136 - protein, 121 aa, Artificial Sequence
  Description of Artificial Sequence: Synthetic polypeptide
QVQLVQSGAEVKKPGASVKVSCKASGYTFTSYWMNWVRQAPGQGLEWMGMIHPSDSETRLNQKFKDRVTMTRDTSTSTVYMELSSLRSEDTAVYYCARQGIITSVQEFAYWGQGTLVTVSS

SEQ ID NO: 137 - protein, 121 aa, Artificial Sequence
  Description of Artificial Sequence: Synthetic polypeptide
QVQLVQSGAEVKKPGASVKVSCKASGYTFTSYWMNWVRQAPGQGLEWMGMIHPSDSETRLNQKFKDRVTMTVDKSISTAYMELSRLRSDDTAVYYCARQGIITSVQEFAYWGQGTLVTVSS

SEQ ID NO: 138 - protein, 121 aa, Artificial Sequence
  Description of Artificial Sequence: Synthetic polypeptide
QVQLVQSGAEVKKPGASVKVSCKASGYTFTSYWMNWVRQAPGQGLEWMGMIHPSDSETRLNQKFTDRVTMTRDTSTSTVYMELSSLRSEDTAVYYCARQGIITSVQEFAYWGQGTLVTVSS

SEQ ID NO: 139 - protein, 117 aa, Artificial Sequence
  Description of Artificial Sequence: Synthetic polypeptide
QVQLVQSGAEVKKPGSSVKVSCKASGYAFSDYWINWVRQAPGQGLEWMGQVYPGDDDINYNGKFRGRVTITADKSTSTAYMELSSLRSEDTAVYYCARHGNYVMDYWGQGTTVTVSS

SEQ ID NO: 140 - protein, 117 aa, Artificial Sequence
  Description of Artificial Sequence: Synthetic polypeptide
QVQLVQSGAEVKKPGSSVKVSCKASGYEFSSHWMNWVRQAPGQGLEWMGQIYPGDGDINYNEKFRGRVTITADKSTSTAYMELSSLRSEDTAVYYCARHGNYVMDYWGQGTTVTVSS

SEQ ID NO: 141 - protein, 117 aa, Artificial Sequence
  Description of Artificial Sequence: Synthetic polypeptide
QVQLVQSGAEVKKPGSSVKVSCKASGYIFSNHWMNWVRQAPGQGLEWMGQIYPGDGDINYNGKFRGRVTITADKSTSTAYMELSSLRSEDTAVYYCARHGNYLMDYWGQGTTVTVSS

SEQ ID NO: 142 - protein, 121 aa, Artificial Sequence; identical to SEQ ID NO: 128
  Description of Artificial Sequence: Synthetic polypeptide

SEQ ID NO: 143 - protein, 121 aa, Artificial Sequence
  Description of Artificial Sequence: Synthetic polypeptide
QVQLVQSGAEVKKPGSSVKVSCKASGYTFTSYWLNWVRQAPGQGLEWMGMIHPSDSETRLNQKFKDRVTITADKSTSTAYMELSSLRSEDTAVYYCARQGIITSVQEFAYWGQGTLVTVSS

SEQ ID NO: 144 - protein, 121 aa, Artificial Sequence
  Description of Artificial Sequence: Synthetic polypeptide
QVQLVQSGAEVKKPGSSVKVSCKASGYTFTSYWMNWVRQAPGQGLEWMGMIHPSDSESRLNQKFKDRVTITADKSTSTAYMELSSLRSEDTAVYYCARQGIITSVQEFAYWGQGTLVTVSS

SEQ ID NO: 145 - protein, 121 aa, Artificial Sequence
  Description of Artificial Sequence: Synthetic polypeptide
QVQLVQSGAEVKKPGSSVKVSCKASGYTFTSYWMNWVRQAPGQGLEWMGMIHPSDSETRLNQKFKDRVTITADKSTSTAYMELSSLRSEDTAVYYCARQGIITSVQEFAYWGQGTLVTVSS

SEQ ID NO: 146 - protein, 120 aa, Artificial Sequence
  Description of Artificial Sequence: Synthetic polypeptide
EVQLVESGGGLVQPGGSLRLSCAASGFTFSSFGMHWVRQAPGKGLEWVSYISSGSSTIYYADTVKGRFTISRDNAKNSLYLQMNSLRAEDTAVYYCARWGYYGSSYFAYWGQGTLVTVSS

SEQ ID NO: 147 - protein, 107 aa, Artificial Sequence
  Description of Artificial Sequence: Synthetic polypeptide
DIQMTQSPSSLSASVGDRVTITCKASEDIYNRLAWYQQKPGKAPKLLIYGATNLETGVPSRFSGSGSGTDFTFTISSLQPEDIATYYCQQFWRTPPTFGGGTKVEIK

SEQ ID NO: 148 - protein, 107 aa, Artificial Sequence
  Description of Artificial Sequence: Synthetic polypeptide
DIQMTQSPSSLSASVGDRVTITCKASEDIYNRLAWYQQKPGKAPKPLISGATNLETGVPSRFSGSGSGKDYTLTISSLQPEDIATYYCQQFWRTPPTFGGGTKVEIK

SEQ ID NO: 149 - protein, 107 aa, Artificial Sequence
  Description of Artificial Sequence: Synthetic polypeptide
DIQMTQSPSSLSASVGDRVTITCKASEDIYNRLAWYQQKPGKAPKPLISGATNLETGVPSRFSGSGSGTDFTFTISSLQPEDIATYYCQQFWRTPPTFGGGTKVEIK

SEQ ID NO: 150 - protein, 107 aa, Artificial Sequence
  Description of Artificial Sequence: Synthetic polypeptide
DIQMTQSPSSLSASVGDRVTITCKASEDIYNRLAWYQQKPGKAPKPLIYGATNLETGVPSRFSGSGSGTDFTFTISSLQPEDIATYYCQQFWRTPPTFGGGTKVEIK

SEQ ID NO: 151 - protein, 106 aa, Artificial Sequence
  Description of Artificial Sequence: Synthetic polypeptide
EIVLTQSPATLSLSPGERATLSCSASSSVNYIFWYQQKPGQAPRLLIYRTSNLASGIPARFSGSGSGTDFTLTISSLEPEDFAVYYCQQYHSYPLTFGGGTKVEIK

SEQ ID NO: 152 - protein, 106 aa, Artificial Sequence
  Description of Artificial Sequence: Synthetic polypeptide
EIVLTQSPATLSLSPGERATLSCSASSSVNYIYWYQQKPGQAPRLLIYRTSNLASGIPARFSGSGSGTDFTLTISSLEPEDFAVYYCQQYHSYPLTFGGGTKVEIK

SEQ ID NO: 153 - protein, 106 aa, Artificial Sequence
  Description of Artificial Sequence: Synthetic polypeptide
EIVLTQSPATLSLSPGERATLSCSASSSVSYMFWYQQKPGQAPRLLIYRTSNLASGIPARFSGSGSGTDFTLTISSLEPEDFAVYYCQQFHDYPRTFGGGTKVEIK

SEQ ID NO: 154 - protein, 106 aa, Artificial Sequence
  Description of Artificial Sequence: Synthetic polypeptide
EIVLTQSPATLSLSPGERATLSCSASSSVSYMFWYQQKPGQAPRLLIYRTSNLASGIPARFSGSGSGTDFTLTISSLEPEDFAVYYCQQFHSYPRTFGGGTKVEIK

SEQ ID NO: 155 - protein, 106 aa, Artificial Sequence
  Description of Artificial Sequence: Synthetic polypeptide
EIVLTQSPATLSLSPGERATLSCSASSSVSYMFWYQQKPGQAPRPWIYRTSNLASGIPPRFSGSGSGTDYTLTISSLEPEDFAVYYCQQFHDYPRTFGGGTKVEIK

SEQ ID NO: 156 - protein, 106 aa, Artificial Sequence
  Description of Artificial Sequence: Synthetic polypeptide
EIVLTQSPATLSLSPGERATLSCSVSSNVDYVFWYQQKPGQAPRLLIYRTSNLATGIPARFSGSGSGTDFTLTISSLEPEDFAVYYCQQFHSYPRTFGGGTKVEIK

SEQ ID NO: 157 - protein, 106 aa, Artificial Sequence
  Description of Artificial Sequence: Synthetic polypeptide
EIVLTQSPATLSVSPGERATLSCSASSSVNYIYWYQQKPGQAPRPWIYRTSNLASGIPARFSGSGSGTEYTLTISSLQSEDFAVYYCQQYHSYPLTFGGGTKVEIK

SEQ ID NO: 158 - protein, 106 aa, Artificial Sequence
  Description of Artificial Sequence: Synthetic polypeptide
EIVMTQSPATLSVSPGERATLSCSASSSLNYIYWYQQKPGQAPRLLIYRTSNLASGIPARFSGSGSGTEFTLTISSLQSEDFAVYYCQQYHSYPLTFGGGTKVEIK

SEQ ID NO: 159 - protein, 106 aa, Artificial Sequence
  Description of Artificial Sequence: Synthetic polypeptide
EIVMTQSPATLSVSPGERATLSCSASSSVNYIYWYQQKPGQAPRLLIYRTSNLASGIPARFSGSGSGTEFTLTISSLQSEDFAVYYCQQYHSYPLTFGGGTKVEIK

SEQ ID NO: 160 - protein, 106 aa, Artificial Sequence
  Description of Artificial Sequence: Synthetic polypeptide
EIVMTQSPATLSVSPGERATLSCSASSSVSYMFWYQQKPGQAPRLLIYRTSNLASGIPARFSGSGSGTEFTLTISSLQSEDFAVYYCQQFHDYPRTFGGGTKVEIK

SEQ ID NO: 161 - protein, 105 aa, Artificial Sequence
  Description of Artificial Sequence: Synthetic polypeptide
IQLTQSPSFLSASVGDRVTITCSASSSVSYMFWYQQKPGKAPKLLIYRTSNLASGVPPRFSGSGSGTEFTLTISSLQPEDFATYYCQQFHDYPRTFGGGTKVEIK

SEQ ID NO: 162 - protein, 106 aa, Artificial Sequence
  Description of Artificial Sequence: Synthetic polypeptide
IQLTQSPSFLSASVGDRVTITCSASSSVSYMFWYQQKPGKAPKLLIYRTSNLASGVPPRFSGSGSGTEYTLTISSLQPEDFATYYCQQFHDYPRTFGGGTKVEIKR

SEQ ID NO: 163 - protein, 105 aa, Artificial Sequence
  Description of Artificial Sequence: Synthetic polypeptide
IQLTQSPSFLSASVGDRVTITCSASSSVSYMFWYQQKPGKAPKLLIYRTSNLASGVPSRFSGSGSGTEFTLTISSLQPEDFATYYCQQFHDYPRTFGGGTKVEIK

SEQ ID NO: 164 - protein, 105 aa, Artificial Sequence
  Description of Artificial Sequence: Synthetic polypeptide
IQLTQSPSFLSASVGDRVTITCSASSSVSYMFWYQQKPGKAPKLLIYRTSNLASGVPSRFSGSGSGTEYTLTISSLQPEDFATYYCQQFHDYPRTFGGGTKVEIK

SEQ ID NO: 165 - protein, 105 aa, Artificial Sequence
  Description of Artificial Sequence: Synthetic polypeptide
IQLTQSPSFLSASVGDRVTITCSASSSVSYMFWYQQKPGKAPKPWIYRTSNLASGVPPRFSGSGSGTEYTLTISSLQPEDFATYYCQQFHDYPRTFGGGTKVEIK

SEQ ID NO: 166 - protein, 105 aa, Artificial Sequence
  Description of Artificial Sequence: Synthetic polypeptide
IQLTQSPSFLSASVGDRVTITCSASSSVSYMFWYQQKPGKAPKPWIYRTSNLASGVPSRFSGSGSGTEFTLTISSLQPEDFATYYCQQFHDYPRTFGGGTKVEIK

SEQ ID NO: 167 - protein, 105 aa, Artificial Sequence
  Description of Artificial Sequence: Synthetic polypeptide
IQMTQSPSSLSASVGDRVTITCSASSSVNYIFWYQQKPGKAPKLLIYRTSNLASGVPSRFSGSGSGTDFTLTISSLQPEDFATYYCQQYHSYPLTFGGGTKVEIK

SEQ ID NO: 168 - protein, 105 aa, Artificial Sequence
  Description of Artificial Sequence: Synthetic polypeptide
IQMTQSPSSLSASVGDRVTITCSASSSVNYIYWYQQKPGKAPKLLIYRTSNLASGVPSRFSGSGSGTDFTLTISSLQPEDFATYYCQQYHSYPLTFGGGTKVEIK

SEQ ID NO: 169 - protein, 107 aa, Artificial Sequence
  Description of Artificial Sequence: Synthetic polypeptide
DIQMTQSPSSLSASVGDRVTITCKASEDIYNRLAWYQQKPGKAPKLLIYGATNLETGVPSRFSGSGSGKDYTLTISSLQPEDIATYYCQQFWRTPPTFGGGTKVEIK

SEQ ID NO: 170 - protein, 10 aa, Artificial Sequence
  Description of Artificial Sequence: Synthetic peptide
GFTFSSFGMH

SEQ ID NO: 171 - protein, 10 aa, Artificial Sequence
  Description of Artificial Sequence: Synthetic peptide
GYAFNNYWMN

SEQ ID NO: 172 - protein, 10 aa, Artificial Sequence
  Description of Artificial Sequence: Synthetic peptide
GYAFSSYWMN

SEQ ID NO: 173 - protein, 10 aa, Artificial Sequence
  Description of Artificial Sequence: Synthetic peptide
GYTFTNFGIT

SEQ ID NO: 174 - protein, 10 aa, Artificial Sequence
  Description of Artificial Sequence: Synthetic peptide
GYTFTNSGMN

SEQ ID NO: 175 - protein, 10 aa, Artificial Sequence
  Description of Artificial Sequence: Synthetic peptide
GYTFTNYGMN

SEQ ID NO: 176 - protein, 17 aa, Artificial Sequence
  Description of Artificial Sequence: Synthetic peptide
EIYPSSGNTFYNEKFKG

SEQ ID NO: 177 - protein, 17 aa, Artificial Sequence
  Description of Artificial Sequence: Synthetic peptide
QISPGNGNSNFNGKFKG

SEQ ID NO: 178 - protein, 17 aa, Artificial Sequence
  Description of Artificial Sequence: Synthetic peptide
QIYPGNGNSNFNGKFKA

SEQ ID NO: 179 - protein, 17 aa, Artificial Sequence
  Description of Artificial Sequence: Synthetic peptide
WINTNTGEPTFAEEFRG

SEQ ID NO: 180 - protein, 17 aa, Artificial Sequence
  Description of Artificial Sequence: Synthetic peptide
WINTNTGEPTYAEEFKG

SEQ ID NO: 181 - protein, 17 aa, Artificial Sequence
  Description of Artificial Sequence: Synthetic peptide
YISSGNSAIYYADTVNG

SEQ ID NO: 182 - protein, 12 aa, Artificial Sequence
  Description of Artificial Sequence: Synthetic peptide
GGGPLRSRYFDY

SEQ ID NO: 183 - protein, 10 aa, Artificial Sequence
  Description of Artificial Sequence: Synthetic peptide
GGRFGNAMDY

SEQ ID NO: 184 - protein, 10 aa, Artificial Sequence
  Description of Artificial Sequence: Synthetic peptide
GGRYGNAMDY

SEQ ID NO: 185 - protein, 9 aa, Artificial Sequence
  Description of Artificial Sequence: Synthetic peptide
LRYGNSFDY

SEQ ID NO: 186 - protein, 9 aa, Artificial Sequence
  Description of Artificial Sequence: Synthetic peptide
YFYGNSFVY

SEQ ID NO: 187 - protein, 9 aa, Artificial Sequence
  Description of Artificial Sequence: Synthetic peptide
YYYGNSFAY

SEQ ID NO: 188 - protein, 17 aa, Artificial Sequence
  Description of Artificial Sequence: Synthetic peptide
KSSQSLLNSGNQKNYLT

SEQ ID NO: 189 - protein, 17 aa, Artificial Sequence
  Description of Artificial Sequence: Synthetic peptide
KSSQSLLNSGNQRNYLT

SEQ ID NO: 190 - protein, 17 aa, Artificial Sequence
  Description of Artificial Sequence: Synthetic peptide
RSSQSLFSSGNQKNYLT

SEQ ID NO: 191 - protein, 7 aa, Artificial Sequence
  Description of Artificial Sequence: Synthetic peptide
WASTRES

SEQ ID NO: 192 - protein, 9 aa, Artificial Sequence
  Description of Artificial Sequence: Synthetic peptide
QNAYFYPYT

SEQ ID NO: 193 - protein, 9 aa, Artificial Sequence
  Description of Artificial Sequence: Synthetic peptide
QNDYYYPLT

SEQ ID NO: 194 - protein, 9 aa, Artificial Sequence
  Description of Artificial Sequence: Synthetic peptide
QNNYFYPLT

SEQ ID NO: 195 - protein, 9 aa, Artificial Sequence
  Description of Artificial Sequence: Synthetic peptide
QNNYNFPLT

SEQ ID NO: 196 - protein, 9 aa, Artificial Sequence
  Description of Artificial Sequence: Synthetic peptide
QNNYYYPLT

SEQ ID NO: 197 - protein, 118 aa, Artificial Sequence
  Description of Artificial Sequence: Synthetic polypeptide
EVQLVESGGGLVQPGGSLRLSCAASGFTFSSFGMHWVRQAPGKGLEWVAYISSGNSAIYYADTVNGRFTISRDNPKNTLYLQMNSLRAEDTAVYYCARLRYGNSFDYWGQGTLVTVSS

SEQ ID NO: 198 - protein, 118 aa, Artificial Sequence
  Description of Artificial Sequence: Synthetic polypeptide
EVQLVESGGGLVQPGGSLRLSCAASGFTFSSFGMHWVRQAPGKGLEWVSYISSGNSAIYYADTVNGRFTISRDNAKNSLYLQMNSLRAEDTAVYYCARLRYGNSFDYWGQGTLVTVSS

SEQ ID NO: 199 - protein, 118 aa, Artificial Sequence
  Description of Artificial Sequence: Synthetic polypeptide
QIQLVQSGAEVKKPGASVKVSCKASGYTFTNSGMNWVRQAPGQGLEWMGWINTNTGEPTFAEEFRGRVTFTLDTSASTAYMELSRLRSDDTAVYYCARYYYGNSFAYWGQGTLVTVSS

SEQ ID NO: 200 - protein, 121 aa, Artificial Sequence
  Description of Artificial Sequence: Synthetic polypeptide
QVQLVQSGAEVKKPGASVKVSCKASGYTFTNFGITWVRQAPGQGLEWIGEIYPSSGNTFYNEKFKGRVTLTADKSSSAAYMELRSLRSDDTAVYYCARGGGPLRSRYFDYWGQGTLVTVSS

SEQ ID NO: 201 - protein, 121 aa, Artificial Sequence
  Description of Artificial Sequence: Synthetic polypeptide
QVQLVQSGAEVKKPGASVKVSCKASGYTFTNFGITWVRQAPGQGLEWMGEIYPSSGNTFYNEKFKGRVTMTTDTSTSTAYMELRSLRSDDTAVYYCARGGGPLRSRYFDYWGQGTLVTVSS

SEQ ID NO: 202 - protein, 118 aa, Artificial Sequence
  Description of Artificial Sequence: Synthetic polypeptide
QVQLVQSGAEVKKPGASVKVSCKASGYTFTNSGMNWVRQAPGQGLEWMGWINTNTGEPTFAEEFRGRVTMTRDTSISTAYMELSRLRSDDTAVYYCARYYYGNSFAYWGQGTLVTVSS

SEQ ID NO: 203 - protein, 118 aa, Artificial Sequence
  Description of Artificial Sequence: Synthetic polypeptide
QVQLVQSGAEVKKPGASVKVSCKASGYTFTNYGMNWVRQAPGQGLEWMGWINTNTGEPTYAEEFKGRVTMTRDTSISTAYMELSRLRSDDTAVYYCARYFYGNSFVYWGQGTLVTVSS

SEQ ID NO: 204 - protein, 119 aa, Artificial Sequence
  Description of Artificial Sequence: Synthetic polypeptide
QVQLVQSGAEVKKPGSSVKVSCKASGYAFNNYWMNWVRQAPGQGLEWMGQISPGNGNSNFNGKFKGRVTITADKSTSTAYMELSSLRSEDTAVYYCARGGRYGNAMDYWGQGTTVTVSS

SEQ ID NO: 205 - protein, 119 aa, Artificial Sequence
  Description of Artificial Sequence: Synthetic polypeptide
QVQLVQSGAEVKKPGSSVKVSCKASGYAFSSYWMNWVRQAPGQGLEWIGQIYPGNGNSNFNGKFKARVTLTADKSSSTAYMELSSLRSEDTAVYYCARGGRFGNAMDYWGQGTTVTVSS

SEQ ID NO: 206 - protein, 119 aa, Artificial Sequence
  Description of Artificial Sequence: Synthetic polypeptide
QVQLVQSGAEVKKPGSSVKVSCKASGYAFSSYWMNWVRQAPGQGLEWMGQIYPGNGNSNFNGKFKARVTITADKSTSTAYMELSSLRSEDTAVYYCARGGRFGNAMDYWGQGTTVTVSS

SEQ ID NO: 207 - protein, 113 aa, Artificial Sequence
  Description of Artificial Sequence: Synthetic polypeptide
DIVMTQSPDSLAVSLGERATINCKSSQSLLNSGNQKNYLTWYQQKPGQPPKLLIFWASTRESGVPDRFSGSGSGTDFTLTISSLQAEDVAVYYCQNNYYYPLTFGGGTKVEIK

SEQ ID NO: 208 - protein, 113 aa, Artificial Sequence
  Description of Artificial Sequence: Synthetic polypeptide
DIVMTQSPDSLAVSLGERATINCKSSQSLLNSGNQKNYLTWYQQKPGQPPKLLIYWASTRESGVPDRFSGSGSGTDFTLTISSLQAEDVAVYYCQNNYNFPLTFGGGTKVEIK

SEQ ID NO: 209 - protein, 113 aa, Artificial Sequence
  Description of Artificial Sequence: Synthetic polypeptide
DIVMTQSPDSLAVSLGERATINCKSSQSLLNSGNQKNYLTWYQQKPGQPPKLLIYWASTRESGVPDRFSGSGSGTDFTLTISSLQAEDVAVYYCQNNYYYPLTFGGGTKVEIK

SEQ ID NO: 210 - protein, 113 aa, Artificial Sequence
  Description of Artificial Sequence: Synthetic polypeptide
DIVMTQSPDSLAVSLGERATINCKSSQSLLNSGNQRNYLTWYQQKPGQPPKLLIYWASTRESGVPDRFSGSGSGTDFTLTISSLQAEDVAVYYCQNAYFYPYTFGGGTKVEIK

SEQ ID NO: 211 - protein, 113 aa, Artificial Sequence
  Description of Artificial Sequence: Synthetic polypeptide
DIVMTQSPDSLAVSLGERATINCRSSQSLFSSGNQKNYLTWYQQKPGQPPKLLIYWASTRESGVPDRFSGSGSGADFTLTISSLQAEDVAVYYCQNDYYYPLTFGGGTKVEIK

SEQ ID NO: 212 - protein, 113 aa, Artificial Sequence
  Description of Artificial Sequence: Synthetic polypeptide
DIVMTQSPDSLAVSLGERATINCRSSQSLFSSGNQKNYLTWYQQKPGQPPKLLIYWASTRESGVPDRFSGSGSGTDFTLTISSLQAEDVAVYYCQNDYYYPLTFGGGTKVEIK

SEQ ID NO: 213 - protein, 113 aa, Artificial Sequence
  Description of Artificial Sequence: Synthetic polypeptide
DIVMTQSPDSLAVSLGERATMNCKSSQSLLNSGNQKNYLTWYQQKPGQPPKLLIYWASTRESGVPDRFSGSGSGTDFTLTISSLQAEDVAVYYCQNAYFYPYTFGGGTKVEIK

SEQ ID NO: 214 - protein, 113 aa, Artificial Sequence
  Description of Artificial Sequence: Synthetic polypeptide
DIVMTQSPDSLAVSLGERATINCKSSQSLLNSGNQKNYLTWYQQKPGQPPKLLIYWASTRESGVPDRFSGSGSGTDFTLTISSLQAEDVAVYYCQNAYFYPYTFGGGTKVEIK

SEQ ID NO: 215 - protein, 113 aa, Artificial Sequence
  Description of Artificial Sequence: Synthetic polypeptide
DIVMTQSPDSLAVSLGERATINCKSSQSLLNSGNQKNYLTWYQQKPGQPPKLLIYWASTRESGVPDRFSGSGSGTDFTLTISSLQAEDVAVYYCQNNYFYPLTFGGGTKVEIK

SEQ ID NO: 216 - protein, 6 aa, Artificial Sequence
  Description of Artificial Sequence: Synthetic peptide
SGGGGS

SEQ ID NO: 217 - protein, 330 aa, Artificial Sequence
  Description of Artificial Sequence: Synthetic polypeptide
ASTKGPSVFPLAPSSKSTSGGTAALGCLVKDYFPEPVTVSWNSGALTSGVHTFPAVLQSSGLYSLSSVVTVPSSSLGTQTYICNVNHKPSNTKVDKRVEPKSCDKTHTCPPCPAPELLGGPSVFLFPPKPKDTLMISRTPEVTCVVVDVSHEDPEVKFNWYVDGVEVHNAKTKPREEQYNSTYRVVSVLTVLHQDWLNGKEYKCKVSNKALPAPIEKTISKAKGQPREPQVYTLPPSRDELTKNQVSLTCLVKGFYPSDIAVEWESNGQPENNYKTTPPVLDSDGSFFLYSKLTVDKSRWQQGNVFSCSVMHEALHNHYTQKSLSLSPGK

SEQ ID NO: 218 - protein, 330 aa, Artificial Sequence
  Description of Artificial Sequence: Synthetic polypeptide
ASTKGPSVFPLAPSSKSTSGGTAALGCLVKDYFPEPVTVSWNSGALTSGVHTFPAVLQSSGLYSLSSVVTVPSSSLGTQTYICNVNHKPSNTKVDKRVEPKSCDKTHTCPPCPAPELLGGPSVFLFPPKPKDTLMISRTPEVTCVVVDVSHEDPEVKFNWYVDGVEVHNAKTKPREEQYASTYRVVSVLTVLHQDWLNGKEYKCKVSNKALPAPIEKTISKAKGQPREPQVYTLPPSRDELTKNQVSLTCLVKGFYPSDIAVEWESNGQPENNYKTTPPVLDSDGSFFLYSKLTVDKSRWQQGNVFSCSVMHEALHNHYTQKSLSLSPGK

SEQ ID NO: 219 - protein, 330 aa, Artificial Sequence
  Description of Artificial Sequence: Synthetic polypeptide
ASTKGPSVFPLAPSSKSTSGGTAALGCLVKDYFPEPVTVSWNSGALTSGVHTFPAVLQSSGLYSLSSVVTVPSSSLGTQTYICNVNHKPSNTKVDKRVEPKSCDKTHTCPPCPAPEFEGGPSVFLFPPKPKDTLMISRTPEVTCVVVDVSHEDPEVKFNWYVDGVEVHNAKTKPREEQYNSTYRVVSVLTVLHQDWLNGKEYKCKVSNKALPASIEKTISKAKGQPREPQVYTLPPSRDELTKNQVSLTCLVKGFYPSDIAVEWESNGQPENNYKTTPPVLDSDGSFFLYSKLTVDKSRWQQGNVFSCSVMHEALHNHYTQKSLSLSPGK

SEQ ID NO: 220 - protein, 330 aa, Artificial Sequence
  Description of Artificial Sequence: Synthetic polypeptide
ASTKGPSVFPLAPSSKSTSGGTAALGCLVKDYFPEPVTVSWNSGALTSGVHTFPAVLQSSGLYSLSSVVTVPSSSLGTQTYICNVNHKPSNTKVDKRVEPKSCDKTHTCPPCPAPELLGGPSVFLFPPKPKDTLMISRTPEVTCVVVDVSHEDPEVKFNWYVDGVEVHNAKTKPREEQYNSTYRVVSVLTVLHQDWLNGKEYKCKVSNKALPAPIEKTISKAKGQPREPQVCTLPPSRDELTKNQVSLTCLVEGFYPSDIAVEWESNGQPENNYKTTPPVLDSDGSFFLYSDLTVDKSRWQQGNVFSCSVMHEALHNHYTQESLSLSPGK

SEQ ID NO: 221 - protein, 330 aa, Artificial Sequence
  Description of Artificial Sequence: Synthetic polypeptide
ASTKGPSVFPLAPSSKSTSGGTAALGCLVKDYFPEPVTVSWNSGALTSGVHTFPAVLQSSGLYSLSSVVTVPSSSLGTQTYICNVNHKPSNTKVDKRVEPKSCDKTHTCPPCPAPELLGGPSVFLFPPKPKDTLMISRTPEVTCVVVDVSHEDPEVKFNWYVDGVEVHNAKTKPREEQYNSTYRVVSVLTVLHQDWLNGKEYKCKVSNKALPAPIEKTISKAKGQPREPQVYTLPPCRKKLTKNQVSLTCLVKGFYPSDIAVEWESNGQPENNYKTTPPVLKSDGSFFLYSKLTVDKSRWQQGNVFSCSVMHEALHNHYTQKSLSLSPGK

SEQ ID NO: 222 - protein, 330 aa, Artificial Sequence
  Description of Artificial Sequence: Synthetic polypeptide
ASTKGPSVFPLAPSSKSTSGGTAALGCLVKDYFPEPVTVSWNSGALTSGVHTFPAVLQSSGLYSLSSVVTVPSSSLGTQTYICNVNHKPSNTKVDKRVEPKSCDKTHTCPPCPAPELLGGPSVFLFPPKPKDTLMISRTPEVTCVVVDVSHEDPEVKFNWYVDGVEVHNAKTKPREEQYNSTYRVVSVLTVLHQDWLNGKEYKCKVSNKALPAPIEKTISKAKGQPREPQVYTLPPSRDELTKNQVSLWCLVKGFYPSDIAVEWESNGQPENNYKTTPPVLDSDGSFFLYSKLTVDKSRWQQGNVFSCSVMHEALHNHYTQKSLSLSPGK

SEQ ID NO: 223 - protein, 330 aa, Artificial Sequence
  Description of Artificial Sequence: Synthetic polypeptide
ASTKGPSVFPLAPSSKSTSGGTAALGCLVKDYFPEPVTVSWNSGALTSGVHTFPAVLQSSGLYSLSSVVTVPSSSLGTQTYICNVNHKPSNTKVDKRVEPKSCDKTHTCPPCPAPELLGGPSVFLFPPKPKDTLMISRTPEVTCVVVDVSHEDPEVKFNWYVDGVEVHNAKTKPREEQYNSTYRVVSVLTVLHQDWLNGKEYKCKVSNKALPAPIEKTISKAKGQPREPQVYTLPPSRDELTKNQVSLSCAVKGFYPSDIAVEWESNGQPENNYKTTPPVLDSDGSFFLVSKLTVDKSRWQQGNVFSCSVMHEALHNHYTQKSLSLSPGK

SEQ ID NO: 224 - protein, 330 aa, Artificial Sequence
  Description of Artificial Sequence: Synthetic polypeptide
ASTKGPSVFPLAPSSKSTSGGTAALGCLVKDYFPEPVTVSWNSGALTSGVHTFPAVLQSSGLYSLSSVVTVPSSSLGTQTYICNVNHKPSNTKVDKRVEPKSCDKTHTCPPCPAPEFEGGPSVFLFPPKPKDTLMISRTPEVTCVVVDVSHEDPEVKFNWYVDGVEVHNAKTKPREEQYNSTYRVVSVLTVLHQDWLNGKEYKCKVSNKALPASIEKTISKAKGQPREPQVCTLPPSRDELTKNQVSLTCLVEGFYPSDIAVEWESNGQPENNYKTTPPVLDSDGSFFLYSDLTVDKSRWQQGNVFSCSVMHEALHNHYTQESLSLSPGK

SEQ ID NO: 225 - protein, 330 aa, Artificial Sequence
  Description of Artificial Sequence: Synthetic polypeptide
ASTKGPSVFPLAPSSKSTSGGTAALGCLVKDYFPEPVTVSWNSGALTSGVHTFPAVLQSSGLYSLSSVVTVPSSSLGTQTYICNVNHKPSNTKVDKRVEPKSCDKTHTCPPCPAPEFEGGPSVFLFPPKPKDTLMISRTPEVTCVVVDVSHEDPEVKFNWYVDGVEVHNAKTKPREEQYNSTYRVVSVLTVLHQDWLNGKEYKCKVSNKALPASIEKTISKAKGQPREPQVYTLPPCRKKLTKNQVSLTCLVKGFYPSDIAVEWESNGQPENNYKTTPPVLKSDGSFFLYSKLTVDKSRWQQGNVFSCSVMHEALHNHYTQKSLSLSPGK

SEQ ID NO: 226 - protein, 330 aa, Artificial Sequence
  Description of Artificial Sequence: Synthetic polypeptide
ASTKGPSVFPLAPSSKSTSGGTAALGCLVKDYFPEPVTVSWNSGALTSGVHTFPAVLQSSGLYSLSSVVTVPSSSLGTQTYICNVNHKPSNTKVDKRVEPKSCDKTHTCPPCPAPEFEGGPSVFLFPPKPKDTLMISRTPEVTCVVVDVSHEDPEVKFNWYVDGVEVHNAKTKPREEQYNSTYRVVSVLTVLHQDWLNGKEYKCKVSNKALPASIEKTISKAKGQPREPQVYTLPPSRDELTKNQVSLWCLVKGFYPSDIAVEWESNGQPENNYKTTPPVLDSDGSFFLYSKLTVDKSRWQQGNVFSCSVMHEALHNHYTQKSLSLSPGK

SEQ ID NO: 227 - protein, 330 aa, Artificial Sequence
  Description of Artificial Sequence: Synthetic polypeptide
ASTKGPSVFPLAPSSKSTSGGTAALGCLVKDYFPEPVTVSWNSGALTSGVHTFPAVLQSSGLYSLSSVVTVPSSSLGTQTYICNVNHKPSNTKVDKRVEPKSCDKTHTCPPCPAPEFEGGPSVFLFPPKPKDTLMISRTPEVTCVVVDVSHEDPEVKFNWYVDGVEVHNAKTKPREEQYNSTYRVVSVLTVLHQDWLNGKEYKCKVSNKALPASIEKTISKAKGQPREPQVYTLPPSRDELTKNQVSLSCAVKGFYPSDIAVEWESNGQPENNYKTTPPVLDSDGSFFLVSKLTVDKSRWQQGNVFSCSVMHEALHNHYTQKSLSLSPGK

SEQ ID NO: 228 - protein, 330 aa, Artificial Sequence
  Description of Artificial Sequence: Synthetic polypeptide
ASTKGPSVFPLAPSSKSTSGGTAALGCLVKDYFPEPVTVSWNSGALTSGVHTFPAVLQSSGLYSLSSVVTVPSSSLGTQTYICNVNHKPSNTKVDKRVEPKSCDKTHTCPPCPAPELLGGPSVFLFPPKPKDTLMISRTPEVTCVVVDVSHEDPEVKFNWYVDGVEVHNAKTKPREEQYASTYRVVSVLTVLHQDWLNGKEYKCKVSNKALPAPIEKTISKAKGQPREPQVCTLPPSRDELTKNQVSLTCLVEGFYPSDIAVEWESNGQPENNYKTTPPVLDSDGSFFLYSDLTVDKSRWQQGNVFSCSVMHEALHNHYTQESLSLSPGK

SEQ ID NO: 229 - protein, 330 aa, Artificial Sequence
  Description of Artificial Sequence: Synthetic polypeptide
ASTKGPSVFPLAPSSKSTSGGTAALGCLVKDYFPEPVTVSWNSGALTSGVHTFPAVLQSSGLYSLSSVVTVPSSSLGTQTYICNVNHKPSNTKVDKRVEPKSCDKTHTCPPCPAPELLGGPSVFLFPPKPKDTLMISRTPEVTCVVVDVSHEDPEVKFNWYVDGVEVHNAKTKPREEQYASTYRVVSVLTVLHQDWLNGKEYKCKVSNKALPAPIEKTISKAKGQPREPQVYTLPPCRKKLTKNQVSLTCLVKGFYPSDIAVEWESNGQPENNYKTTPPVLKSDGSFFLYSKLTVDKSRWQQGNVFSCSVMHEALHNHYTQKSLSLSPGK

SEQ ID NO: 230 - protein, 330 aa, Artificial Sequence
  Description of Artificial Sequence: Synthetic polypeptide
ASTKGPSVFPLAPSSKSTSGGTAALGCLVKDYFPEPVTVSWNSGALTSGVHTFPAVLQSSGLYSLSSVVTVPSSSLGTQTYICNVNHKPSNTKVDKRVEPKSCDKTHTCPPCPAPELLGGPSVFLFPPKPKDTLMISRTPEVTCVVVDVSHEDPEVKFNWYVDGVEVHNAKTKPREEQYASTYRVVSVLTVLHQDWLNGKEYKCKVSNKALPAPIEKTISKAKGQPREPQVYTLPPSRDELTKNQVSLWCLVKGFYPSDIAVEWESNGQPENNYKTTPPVLDSDGSFFLYSKLTVDKSRWQQGNVFSCSVMHEALHNHYTQKSLSLSPGK

SEQ ID NO: 231 - protein, 330 aa, Artificial Sequence
  Description of Artificial Sequence: Synthetic polypeptide
ASTKGPSVFPLAPSSKSTSGGTAALGCLVKDYFPEPVTVSWNSGALTSGVHTFPAVLQSSGLYSLSSVVTVPSSSLGTQTYICNVNHKPSNTKVDKRVEPKSCDKTHTCPPCPAPELLGGPSVFLFPPKPKDTLMISRTPEVTCVVVDVSHEDPEVKFNWYVDGVEVHNAKTKPREEQYASTYRVVSVLTVLHQDWLNGKEYKCKVSNKALPAPIEKTISKAKGQPREPQVYTLPPSRDELTKNQVSLSCAVKGFYPSDIAVEWESNGQPENNYKTTPPVLDSDGSFFLVSKLTVDKSRWQQGNVFSCSVMHEALHNHYTQKSLSLSPGK

SEQ ID NO: 232 - protein, 232 aa, Artificial Sequence
  Description of Artificial Sequence: Synthetic polypeptide
EPKSSDKTHTCPPCPAPELLGGPSVFLFPPKPKDTLMISRTPEVTCVVVDVSHEDPEVKFNWYVDGVEVHNAKTKPREEQYNSTYRVVSVLTVLHQDWLNGKEYKCKVSNKALPAPIEKTISKAKGQPREPQVYTLPPSRDELTKNQVSLTCLVKGFYPSDIAVEWESNGQPENNYKTTPPVLDSDGSFFLYSKLTVDKSRWQQGNVFSCSVMHEALHNHYTQKSLSLSPGK

SEQ ID NO: 233 - protein, 232 aa, Artificial Sequence
  Description of Artificial Sequence: Synthetic polypeptide
EPKSSDKTHTCPPCPAPELLGGPSVFLFPPKPKDTLMISRTPEVTCVVVDVSHEDPEVKFNWYVDGVEVHNAKTKPREEQYASTYRVVSVLTVLHQDWLNGKEYKCKVSNKALPAPIEKTISKAKGQPREPQVYTLPPSRDELTKNQVSLTCLVKGFYPSDIAVEWESNGQPENNYKTTPPVLDSDGSFFLYSKLTVDKSRWQQGNVFSCSVMHEALHNHYTQKSLSLSPGK

SEQ ID NO: 234 - protein, 232 aa, Artificial Sequence
  Description of Artificial Sequence: Synthetic polypeptide
EPKSSDKTHTCPPCPAPEFEGGPSVFLFPPKPKDTLMISRTPEVTCVVVDVSHEDPEVKFNWYVDGVEVHNAKTKPREEQYNSTYRVVSVLTVLHQDWLNGKEYKCKVSNKALPASIEKTISKAKGQPREPQVYTLPPSRDELTKNQVSLTCLVKGFYPSDIAVEWESNGQPENNYKTTPPVLDSDGSFFLYSKLTVDKSRWQQGNVFSCSVMHEALHNHYTQKSLSLSPGK

SEQ ID NO: 235 - protein, 232 aa, Artificial Sequence
  Description of Artificial Sequence: Synthetic polypeptide
EPKSSDKTHTCPPCPAPELLGGPSVFLFPPKPKDTLMISRTPEVTCVVVDVSHEDPEVKFNWYVDGVEVHNAKTKPREEQYNSTYRVVSVLTVLHQDWLNGKEYKCKVSNKALPAPIEKTISKAKGQPREPQVCTLPPSRDELTKNQVSLTCLVEGFYPSDIAVEWESNGQPENNYKTTPPVLDSDGSFFLYSDLTVDKSRWQQGNVFSCSVMHEALHNHYTQESLSLSPGK

SEQ ID NO: 236 - protein, 232 aa, Artificial Sequence
  Description of Artificial Sequence: Synthetic polypeptide
EPKSSDKTHTCPPCPAPELLGGPSVFLFPPKPKDTLMISRTPEVTCVVVDVSHEDPEVKFNWYVDGVEVHNAKTKPREEQYNSTYRVVSVLTVLHQDWLNGKEYKCKVSNKALPAPIEKTISKAKGQPREPQVYTLPPCRKKLTKNQVSLTCLVKGFYPSDIAVEWESNGQPENNYKTTPPVLKSDGSFFLYSKLTVDKSRWQQGNVFSCSVMHEALHNHYTQKSLSLSPGK

SEQ ID NO: 237 - protein, 232 aa, Artificial Sequence
  Description of Artificial Sequence: Synthetic polypeptide
EPKSSDKTHTCPPCPAPELLGGPSVFLFPPKPKDTLMISRTPEVTCVVVDVSHEDPEVKFNWYVDGVEVHNAKTKPREEQYNSTYRVVSVLTVLHQDWLNGKEYKCKVSNKALPAPIEKTISKAKGQPREPQVYTLPPSRDELTKNQVSLWCLVKGFYPSDIAVEWESNGQPENNYKTTPPVLDSDGSFFLYSKLTVDKSRWQQGNVFSCSVMHEALHNHYTQKSLSLSPGK

SEQ ID NO: 238 - protein, 232 aa, Artificial Sequence
  Description of Artificial Sequence: Synthetic polypeptide
EPKSSDKTHTCPPCPAPELLGGPSVFLFPPKPKDTLMISRTPEVTCVVVDVSHEDPEVKFNWYVDGVEVHNAKTKPREEQYNSTYRVVSVLTVLHQDWLNGKEYKCKVSNKALPAPIEKTISKAKGQPREPQVYTLPPSRDELTKNQVSLSCAVKGFYPSDIAVEWESNGQPENNYKTTPPVLDSDGSFFLVSKLTVDKSRWQQGNVFSCSVMHEALHNHYTQKSLSLSPGK

SEQ ID NO: 239 - protein, 232 aa, Artificial Sequence
  Description of Artificial Sequence: Synthetic polypeptide
EPKSSDKTHTCPPCPAPEFEGGPSVFLFPPKPKDTLMISRTPEVTCVVVDVSHEDPEVKFNWYVDGVEVHNAKTKPREEQYNSTYRVVSVLTVLHQDWLNGKEYKCKVSNKALPASIEKTISKAKGQPREPQVCTLPPSRDELTKNQVSLTCLVEGFYPSDIAVEWESNGQPENNYKTTPPVLDSDGSFFLYSDLTVDKSRWQQGNVFSCSVMHEALHNHYTQESLSLSPGK

SEQ ID NO: 240 - protein, 232 aa, Artificial Sequence
  Description of Artificial Sequence: Synthetic polypeptide
EPKSSDKTHTCPPCPAPEFEGGPSVFLFPPKPKDTLMISRTPEVTCVVVDVSHEDPEVKFNWYVDGVEVHNAKTKPREEQYNSTYRVVSVLTVLHQDWLNGKEYKCKVSNKALPASIEKTISKAKGQPREPQVYTLPPCRKKLTKNQVSLTCLVKGFYPSDIAVEWESNGQPENNYKTTPPVLKSDGSFFLYSKLTVDKSRWQQGNVFSCSVMHEALHNHYTQKSLSLSPGK

SEQ ID NO: 241 - protein, 232 aa, Artificial Sequence
  Description of Artificial Sequence: Synthetic polypeptide
EPKSSDKTHTCPPCPAPEFEGGPSVFLFPPKPKDTLMISRTPEVTCVVVDVSHEDPEVKFNWYVDGVEVHNAKTKPREEQYNSTYRVVSVLTVLHQDWLNGKEYKCKVSNKALPASIEKTISKAKGQPREPQVYTLPPSRDELTKNQVSLWCLVKGFYPSDIAVEWESNGQPENNYKTTPPVLDSDGSFFLYSKLTVDKSRWQQGNVFSCSVMHEALHNHYTQKSLSLSPGK

SEQ ID NO: 242 - protein, 232 aa, Artificial Sequence
  Description of Artificial Sequence: Synthetic polypeptide
EPKSSDKTHTCPPCPAPEFEGGPSVFLFPPKPKDTLMISRTPEVTCVVVDVSHEDPEVKFNWYVDGVEVHNAKTKPREEQYNSTYRVVSVLTVLHQDWLNGKEYKCKVSNKALPASIEKTISKAKGQPREPQVYTLPPSRDELTKNQVSLSCAVKGFYPSDIAVEWESNGQPENNYKTTPPVLDSDGSFFLVSKLTVDKSRWQQGNVFSCSVMHEALHNHYTQKSLSLSPGK

SEQ ID NO: 243 - protein, 232 aa, Artificial Sequence
  Description of Artificial Sequence: Synthetic polypeptide
EPKSSDKTHTCPPCPAPELLGGPSVFLFPPKPKDTLMISRTPEVTCVVVDVSHEDPEVKFNWYVDGVEVHNAKTKPREEQYASTYRVVSVLTVLHQDWLNGKEYKCKVSNKALPAPIEKTISKAKGQPREPQVCTLPPSRDELTKNQVSLTCLVEGFYPSDIAVEWESNGQPENNYKTTPPVLDSDGSFFLYSDLTVDKSRWQQGNVFSCSVMHEALHNHYTQESLSLSPGK

SEQ ID NO: 244 - protein, 232 aa, Artificial Sequence
  Description of Artificial Sequence: Synthetic polypeptide
EPKSSDKTHTCPPCPAPELLGGPSVFLFPPKPKDTLMISRTPEVTCVVVDVSHEDPEVKFNWYVDGVEVHNAKTKPREEQYASTYRVVSVLTVLHQDWLNGKEYKCKVSNKALPAPIEKTISKAKGQPREPQVYTLPPCRKKLTKNQVSLTCLVKGFYPSDIAVEWESNGQPENNYKTTPPVLKSDGSFFLYSKLTVDKSRWQQGNVFSCSVMHEALHNHYTQKSLSLSPGK

SEQ ID NO: 245 - protein, 232 aa, Artificial Sequence
  Description of Artificial Sequence: Synthetic polypeptide
EPKSSDKTHTCPPCPAPELLGGPSVFLFPPKPKDTLMISRTPEVTCVVVDVSHEDPEVKFNWYVDGVEVHNAKTKPREEQYASTYRVVSVLTVLHQDWLNGKEYKCKVSNKALPAPIEKTISKAKGQPREPQVYTLPPSRDELTKNQVSLWCLVKGFYPSDIAVEWESNGQPENNYKTTPPVLDSDGSFFLYSKLTVDKSRWQQGNVFSCSVMHEALHNHYTQKSLSLSPGK

SEQ ID NO: 246 - protein, 232 aa, Artificial Sequence
  Description of Artificial Sequence: Synthetic polypeptide
EPKSSDKTHTCPPCPAPELLGGPSVFLFPPKPKDTLMISRTPEVTCVVVDVSHEDPEVKFNWYVDGVEVHNAKTKPREEQYASTYRVVSVLTVLHQDWLNGKEYKCKVSNKALPAPIEKTISKAKGQPREPQVYTLPPSRDELTKNQVSLSCAVKGFYPSDIAVEWESNGQPENNYKTTPPVLDSDGSFFLVSKLTVDKSRWQQGNVFSCSVMHEALHNHYTQKSLSLSPGK

SEQ ID NO: 247 - protein, 107 aa, Artificial Sequence [sequence omitted]

SEQ ID NO: 248 - protein, 125 aa, Artificial Sequence
  Description of Artificial Sequence: Synthetic polypeptide
EVQLVESGGGLVQPKGSLKLSCAASGFTFNTYAMNWVRQAPGKGLEWVARIRSKYNNYATYYADSVKDRFTISRDDSQSILYLQMNNLKTEDTAMYYCVRHGNFGNSYVSWFAYWGQGTLVTVSS

SEQ ID NO: 249 - protein, 125 aa, Artificial Sequence
  Description of Artificial Sequence: Synthetic polypeptide
EVQLVESGGGLVQPGGSLRLSCAASGFTFSTYAMNWVRQAPGKGLEWVGRIRSKANNYATYYADSVKGRFTISRDDSKNTLYLQMNSLRAEDTAVYYCVRHGNFGDSYVSWFAYWGQGTLVTVSS

SEQ ID NO: 250 - protein, 125 aa, Artificial Sequence
  Description of Artificial Sequence: Synthetic polypeptide
EVQLVESGGGLVQPGGSLRLSCAASGFTFSTYAMNWVRQAPGKGLEWVGRIRSKYNNYATYYADSVKGRFTISRDDSKNTLYLQMNSLRAEDTAVYYCVRHGNFGDSYVSWFAYWGQGTLVTVSS

SEQ ID NO: 251 - protein, 125 aa, Artificial Sequence
  Description of Artificial Sequence: Synthetic polypeptide
EVQLVESGGGLVQPGGSLRLSCAASGFTFSTYAMNWVRQAPGKGLEWVGRIRSKINNYATYYADSVKGRFTISRDDSKNTLYLQMNSLRAEDTAVYYCVRHGNFGDSYVSWFAYWGQGTLVTVSS

SEQ ID NO: 252 - protein, 125 aa, Artificial Sequence
  Description of Artificial Sequence: Synthetic polypeptide
EVQLVESGGGLVQPGGSLRLSCAASGFTFSTYAMNWVRQAPGKGLEWVGRIRSKLNNYATYYADSVKGRFTISRDDSKNTLYLQMNSLRAEDTAVYYCVRHGNFGDSYVSWFAYWGQGTLVTVSS

SEQ ID NO: 253 - protein, 125 aa, Artificial Sequence
  Description of Artificial Sequence: Synthetic polypeptide
EVQLVESGGGLVQPGGSLRLSCAASGFTFSTYAMNWVRQAPGKGLEWVGRIRSKVNNYATYYADSVKGRFTISRDDSKNTLYLQMNSLRAEDTAVYYCVRHGNFGDSYVSWFAYWGQGTLVTVSS

SEQ ID NO: 254 - protein, 125 aa, Artificial Sequence
  Description of Artificial Sequence: Synthetic polypeptide
EVQLVESGGGLVQPGGSLRLSCAASGFTFSTYAMNWVRQAPGKGLEWVGRIRSKSNNYATYYADSVKGRFTISRDDSKNTLYLQMNSLRAEDTAVYYCVRHGNFGDSYVSWFAYWGQGTLVTVSS

SEQ ID NO: 255 - protein, 125 aa, Artificial Sequence
  Description of Artificial Sequence: Synthetic polypeptide
EVQLVESGGGLVQPGGSLRLSCAASGFTFSTYAMDWVRQAPGKGLEWVGRIRSKYNNYATYYADSVKGRFTISRDDSKNTLYLQMNSLRAEDTAVYYCVRHGNFGDSYVSWFAYWGQGTLVTVSS

SEQ ID NO: 256 - protein, 125 aa, Artificial Sequence
  Description of Artificial Sequence: Synthetic polypeptide
EVQLVESGGGLVQPGGSLRLSCAASGFTFSTYAMNWVRQAPGKGLEWVGRIRSKYNNYATYYADSVKGRFTISRDDSKNTLYLQMNSLRAEDTAVYYCVRHGNFGDSYVSWFEYWGQGTLVTVSS

SEQ ID NO: 257 - protein, 125 aa, Artificial Sequence
  Description of Artificial Sequence: Synthetic polypeptide
EVQLVESGGGLVQPGGSLRLSCAASGFTFSTYAMNWVRQAPGKGLEWVGRIRSKYNNYATYYADSVKGRFTISRDDSKNTLYLQMNSLRAEDTAVYYCVRHGNFGDSYVSWFDYWGQGTLVTVSS

SEQ ID NO: 258 - protein, 125 aa, Artificial Sequence
  Description of Artificial Sequence: Synthetic polypeptide
EVQLVESGGGLVQPGGSLRLSCAASGFTFSTYAMNWVRQAPGKGLEWVGRIRSKYNNYATYYADSVKGRFTISRDDSKNTLYLQMNSLRAEDTAVYYCVRHGNFGDSYVSWFNYWGQGTLVTVSS

SEQ ID NO: 259 - protein, 125 aa, Artificial Sequence
  Description of Artificial Sequence: Synthetic polypeptide
EVQLVESGGGLVQPGGSLRLSCAASGFTFSTYAMNWVRQAPGKGLEWVGRIRSKYNNYATYYADSVKGRFTISRDDSKNTLYLQMNSLRAEDTAVYYCVRHGNFGDSYVSYFAYWGQGTLVTVSS

SEQ ID NO: 260 - protein, 123 aa, Artificial Sequence
  Description of Artificial Sequence: Synthetic polypeptide
QLVESGGGLVQPGGSLRLSCAASGFTFSTYAMNWVRQAPGKGLEWVGRIRSKANNYATYYADSVKGRFTISRDDSKNTLYLQMNSLRAEDTAVYYCVRHGNFGDSYVSWFAYWGQGTLVTVSS

SEQ ID NO: 261 - protein, 109 aa, Artificial Sequence
  Description of Artificial Sequence: Synthetic polypeptide
QAVVTQEPSLTVSPGGTVTLTCGSSTGAVTTSNYANWVQQKPGKSPRGLIGGTNKRAPGVPARFSGSLLGGKAALTISGAQPEDEADYYCALWYSNHWVFGGGTKLTVL

SEQ ID NO: 262 - protein, 486 aa, Artificial Sequence
  Description of Artificial Sequence: Synthetic polypeptide
EVQLVESGGGLVQPGGSLRLSCAASGFTFSTYAMNWVRQAPGKGLEWVGRIRSKANNYATYYADSVKGRFTISRDDSKNTLYLQMNSLRAEDTAVYYCVRHGNFGDSYVSWFAYWGQGTLVTVSSGKPGSGKPGSGKPGSGKPGSQAVVTQEPSLTVSPGGTVTLTCGSSTGAVTTSNYANWVQQKPGKSPRGLIGGTNKRAPGVPARFSGSLLGGKAALTISGAQPEDEADYYCALWYSNHWVFGGGTKLTVLEPKSSDKTHTCPPCPAPEFEGGPSVFLFPPKPKDTLMISRTPEVTCVVVDVSHEDPEVKFNWYVDGVEVHNAKTKPREEQYNSTYRVVSVLTVLHQDWLNGKEYKCKVSNKALPASIEKTISKAKGQPREPQVYTLPPCRKKLTKNQVSLTCLVKGFYPSDIAVEWESNGQPENNYKTTPPVLKSDGSFFLYSKLTVDKSRWQQGNVFSCSVMHEALHNHYTQKSLSLSPGK

SEQ ID NO: 263 - protein, 486 aa, Artificial Sequence
  Description of Artificial Sequence: Synthetic polypeptide
EVQLVESGGGLVQPGGSLRLSCAASGFTFSTYAMNWVRQAPGKGLEWVGRIRSKYNNYATYYADSVKGRFTISRDDSKNTLYLQMNSLRAEDTAVYYCVRHGNFGDSYVSWFAYWGQGTLVTVSSGKPGSGKPGSGKPGSGKPGSQAVVTQEPSLTVSPGGTVTLTCGSSTGAVTTSNYANWVQQKPGKSPRGLIGGTNKRAPGVPARFSGSLLGGKAALTISGAQPEDEADYYCALWYSNHWVFGGGTKLTVLEPKSSDKTHTCPPCPAPEFEGGPSVFLFPPKPKDTLMISRTPEVTCVVVDVSHEDPEVKFNWYVDGVEVHNAKTKPREEQYNSTYRVVSVLTVLHQDWLNGKEYKCKVSNKALPASIEKTISKAKGQPREPQVYTLPPCRKKLTKNQVSLTCLVKGFYPSDIAVEWESNGQPENNYKTTPPVLKSDGSFFLYSKLTVDKSRWQQGNVFSCSVMHEALHNHYTQKSLSLSPGK

SEQ ID NO: 264 - protein, 486 aa, Artificial Sequence
  Description of Artificial Sequence: Synthetic polypeptide
EVQLVESGGGLVQPGGSLRLSCAASGFTFSTYAMNWVRQAPGKGLEWVGRIRSKINNYATYYADSVKGRFTISRDDSKNTLYLQMNSLRAEDTAVYYCVRHGNFGDSYVSWFAYWGQGTLVTVSSGKPGSGKPGSGKPGSGKPGSQAVVTQEPSLTVSPGGTVTLTCGSSTGAVTTSNYANWVQQKPGKSPRGLIGGTNKRAPGVPARFSGSLLGGKAALTISGAQPEDEADYYCALWYSNHWVFGGGTKLTVLEPKSSDKTHTCPPCPAPEFEGGPSVFLFPPKPKDTLMISRTPEVTCVVVDVSHEDPEVKFNWYVDGVEVHNAKTKPREEQYNSTYRVVSVLTVLHQDWLNGKEYKCKVSNKALPASIEKTISKAKGQPREPQVYTLPPCRKKLTKNQVSLTCLVKGFYPSDIAVEWESNGQPENNYKTTPPVLKSDGSFFLYSKLTVDKSRWQQGNVFSCSVMHEALHNHYTQKSLSLSPGK

SEQ ID NO: 265 - protein, 486 aa, Artificial Sequence
  Description of Artificial Sequence: Synthetic polypeptide
EVQLVESGGGLVQPGGSLRLSCAASGFTFSTYAMNWVRQAPGKGLEWVGRIRSKLNNYATYYADSVKGRFTISRDDSKNTLYLQMNSLRAEDTAVYYCVRHGNFGDSYVSWFAYWGQGTLVTVSSGKPGSGKPGSGKPGSGKPGSQAVVTQEPSLTVSPGGTVTLTCGSSTGAVTTSNYANWVQQKPGKSPRGLIGGTNKRAPGVPARFSGSLLGGKAALTISGAQPEDEADYYCALWYSNHWVFGGGTKLTVLEPKSSDKTHTCPPCPAPEFEGGPSVFLFPPKPKDTLMISRTPEVTCVVVDVSHEDPEVKFNWYVDGVEVHNAKTKPREEQYNSTYRVVSVLTVLHQDWLNGKEYKCKVSNKALPASIEKTISKAKGQPREPQVYTLPPCRKKLTKNQVSLTCLVKGFYPSDIAVEWESNGQPENNYKTTPPVLKSDGSFFLYSKLTVDKSRWQQGNVFSCSVMHEALHNHYTQKSLSLSPGK

SEQ ID NO: 266 - protein, 486 aa, Artificial Sequence
  Description of Artificial Sequence: Synthetic polypeptide
EVQLVESGGGLVQPGGSLRLSCAASGFTFSTYAMNWVRQAPGKGLEWVGRIRSKVNNYATYYADSVKGRFTISRDDSKNTLYLQMNSLRAEDTAVYYCVRHGNFGDSYVSWFAYWGQGTLVTVSSGKPGSGKPGSGKPGSGKPGSQAVVTQEPSLTVSPGGTVTLTCGSSTGAVTTSNYANWVQQKPGKSPRGLIGGTNKRAPGVPARFSGSLLGGKAALTISGAQPEDEADYYCALWYSNHWVFGGGTKLTVLEPKSSDKTHTCPPCPAPEFEGGPSVFLFPPKPKDTLMISRTPEVTCVVVDVSHEDPEVKFNWYVDGVEVHNAKTKPREEQYNSTYRVVSVLTVLHQDWLNGKEYKCKVSNKALPASIEKTISKAKGQPREPQVYTLPPCRKKLTKNQVSLTCLVKGFYPSDIAVEWESNGQPENNYKTTPPVLKSDGSFFLYSKLTVDKSRWQQGNVFSCSVMHEALHNHYTQKSLSLSPGK

SEQ ID NO: 267 - protein, 486 aa, Artificial Sequence
  Description of Artificial Sequence: Synthetic polypeptide
EVQLVESGGGLVQPGGSLRLSCAASGFTFSTYAMNWVRQAPGKGLEWVGRIRSKSNNYATYYADSVKGRFTISRDDSKNTLYLQMNSLRAEDTAVYYCVRHGNFGDSYVSWFAYWGQGTLVTVSSGKPGSGKPGSGKPGSGKPGSQAVVTQEPSLTVSPGGTVTLTCGSSTGAVTTSNYANWVQQKPGKSPRGLIGGTNKRAPGVPARFSGSLLGGKAALTISGAQPEDEADYYCALWYSNHWVFGGGTKLTVLEPKSSDKTHTCPPCPAPEFEGGPSVFLFPPKPKDTLMISRTPEVTCVVVDVSHEDPEVKFNWYVDGVEVHNAKTKPREEQYNSTYRVVSVLTVLHQDWLNGKEYKCKVSNKALPASIEKTISKAKGQPREPQVYTLPPCRKKLTKNQVSLTCLVKGFYPSDIAVEWESNGQPENNYKTTPPVLKSDGSFFLYSKLTVDKSRWQQGNVFSCSVMHEALHNHYTQKSLSLSPGK

SEQ ID NO: 268 - protein, 486 aa, Artificial Sequence
  Description of Artificial Sequence: Synthetic polypeptide
EVQLVESGGGLVQPGGSLRLSCAASGFTFSTYAMDWVRQAPGKGLEWVGRIRSKYNNYATYYADSVKGRFTISRDDSKNTLYLQMNSLRAEDTAVYYCVRHGNFGDSYVSWFAYWGQGTLVTVSSGKPGSGKPGSGKPGSGKPGSQAVVTQEPSLTVSPGGTVTLTCGSSTGAVTTSNYANWVQQKPGKSPRGLIGGTNKRAPGVPARFSGSLLGGKAALTISGAQPEDEADYYCALWYSNHWVFGGGTKLTVLEPKSSDKTHTCPPCPAPEFEGGPSVFLFPPKPKDTLMISRTPEVTCVVVDVSHEDPEVKFNWYVDGVEVHNAKTKPREEQYNSTYRVVSVLTVLHQDWLNGKEYKCKVSNKALPASIEKTISKAKGQPREPQVYTLPPCRKKLTKNQVSLTCLVKGFYPSDIAVEWESNGQPENNYKTTPPVLKSDGSFFLYSKLTVDKSRWQQGNVFSCSVMHEALHNHYTQKSLSLSPGK

SEQ ID NO: 269 - protein, 486 aa, Artificial Sequence
  Description of Artificial Sequence: Synthetic polypeptide
EVQLVESGGGLVQPGGSLRLSCAASGFTFSTYAMNWVRQAPGKGLEWVGRIRSKYNNYATYYADSVKGRFTISRDDSKNTLYLQMNSLRAEDTAVYYCVRHGNFGDSYVSWFEYWGQGTLVTVSSGKPGSGKPGSGKPGSGKPGSQAVVTQEPSLTVSPGGTVTLTCGSSTGAVTTSNYANWVQQKPGKSPRGLIGGTNKRAPGVPARFSGSLLGGKAALTISGAQPEDEADYYCALWYSNHWVFGGGTKLTVLEPKSSDKTHTCPPCPAPEFEGGPSVFLFPPKPKDTLMISRTPEVTCVVVDVSHEDPEVKFNWYVDGVEVHNAKTKPREEQYNSTYRVVSVLTVLHQDWLNGKEYKCKVSNKALPASIEKTISKAKGQPREPQVYTLPPCRKKLTKNQVSLTCLVKGFYPSDIAVEWESNGQPENNYKTTPPVLKSDGSFFLYSKLTVDKSRWQQGNVFSCSVMHEALHNHYTQKSLSLSPGK

SEQ ID NO: 270 - protein, 486 aa, Artificial Sequence
  Description of Artificial Sequence: Synthetic polypeptide
EVQLVESGGGLVQPGGSLRLSCAASGFTFSTYAMNWVRQAPGKGLEWVGRIRSKYNNYATYYADSVKGRFTISRDDSKNTLYLQMNSLRAEDTAVYYCVRHGNFGDSYVSWFDYWGQGTLVTVSSGKPGSGKPGSGKPGSGKPGSQAVVTQEPSLTVSPGGTVTLTCGSSTGAVTTSNYANWVQQKPGKSPRGLIGGTNKRAPGVPARFSGSLLGGKAALTISGAQPEDEADYYCALWYSNHWVFGGGTKLTVLEPKSSDKTHTCPPCPAPEFEGGPSVFLFPPKPKDTLMISRTPEVTCVVVDVSHEDPEVKFNWYVDGVEVHNAKTKPREEQYNSTYRVVSVLTVLHQDWLNGKEYKCKVSNKALPASIEKTISKAKGQPREPQVYTLPPCRKKLTKNQVSLTCLVKGFYPSDIAVEWESNGQPENNYKTTPPVLKSDGSFFLYSKLTVDKSRWQQGNVFSCSVMHEALHNHYTQKSLSLSPGK

SEQ ID NO: 271 - protein, 486 aa, Artificial Sequence
  Description of Artificial Sequence: Synthetic polypeptide
EVQLVESGGGLVQPGGSLRLSCAASGFTFSTYAMNWVRQAPGKGLEWVGRIRSKYNNYATYYADSVKGRFTISRDDSKNTLYLQMNSLRAEDTAVYYCVRHGNFGDSYVSWFNYWGQGTLVTVSSGKPGSGKPGSGKPGSGKPGSQAVVTQEPSLTVSPGGTVTLTCGSSTGAVTTSNYANWVQQKPGKSPRGLIGGTNKRAPGVPARFSGSLLGGKAALTISGAQPEDEADYYCALWYSNHWVFGGGTKLTVLEPKSSDKTHTCPPCPAPEFEGGPSVFLFPPKPKDTLMISRTPEVTCVVVDVSHEDPEVKFNWYVDGVEVHNAKTKPREEQYNSTYRVVSVLTVLHQDWLNGKEYKCKVSNKALPASIEKTISKAKGQPREPQVYTLPPCRKKLTKNQVSLTCLVKGFYPSDIAVEWESNGQPENNYKTTPPVLKSDGSFFLYSKLTVDKSRWQQGNVFSCSVMHEALHNHYTQKSLSLSPGK

SEQ ID NO: 272 - protein, 486 aa, Artificial Sequence
  Description of Artificial Sequence: Synthetic polypeptide
EVQLVESGGGLVQPGGSLRLSCAASGFTFSTYAMNWVRQAPGKGLEWVGRIRSKYNNYATYYADSVKGRFTISRDDSKNTLYLQMNSLRAEDTAVYYCVRHGNFGDSYVSYFAYWGQGTLVTVSSGKPGSGKPGSGKPGSGKPGSQAVVTQEPSLTVSPGGTVTLTCGSSTGAVTTSNYANWVQQKPGKSPRGLIGGTNKRAPGVPARFSGSLLGGKAALTISGAQPEDEADYYCALWYSNHWVFGGGTKLTVLEPKSSDKTHTCPPCPAPEFEGGPSVFLFPPKPKDTLMISRTPEVTCVVVDVSHEDPEVKFNWYVDGVEVHNAKTKPREEQYNSTYRVVSVLTVLHQDWLNGKEYKCKVSNKALPASIEKTISKAKGQPREPQVYTLPPCRKKLTKNQVSLTCLVKGFYPSDIAVEWESNGQPENNYKTTPPVLKSDGSFFLYSKLTVDKSRWQQGNVFSCSVMHEALHNHYTQKSLSLSPGK

SEQ ID NO: 273 - protein, 484 aa, Artificial Sequence
  Description of Artificial Sequence: Synthetic polypeptide
QLVESGGGLVQPGGSLRLSCAASGFTFSTYAMNWVRQAPGKGLEWVGRIRSKANNYATYYADSVKGRFTISRDDSKNTLYLQMNSLRAEDTAVYYCVRHGNFGDSYVSWFAYWGQGTLVTVSSGKPGSGKPGSGKPGSGKPGSQAVVTQEPSLTVSPGGTVTLTCGSSTGAVTTSNYANWVQQKPGKSPRGLIGGTNKRAPGVPARFSGSLLGGKAALTISGAQPEDEADYYCALWYSNHWVFGGGTKLTVLEPKSSDKTHTCPPCPAPEFEGGPSVFLFPPKPKDTLMISRTPEVTCVVVDVSHEDPEVKFNWYVDGVEVHNAKTKPREEQYNSTYRVVSVLTVLHQDWLNGKEYKCKVSNKALPASIEKTISKAKGQPREPQVYTLPPCRKKLTKNQVSLTCLVKGFYPSDIAVEWESNGQPENNYKTTPPVLKSDGSFFLYSKLTVDKSRWQQGNVFSCSVMHEALHNHYTQKSLSLSPGK

SEQ ID NO: 274 - protein, 448 aa, Artificial Sequence
  Description of Artificial Sequence: Synthetic polypeptide
EVQLLESGGGLVQPGGSLRLSCAASGFTFSSYGMHWVRQAPGKGLEWVAVISGSGSSKYYADSVKGRFTISRDNSKNTLYLQMNSLRAEDTAVYYCARDWFFYLFDYWGQGTLVTVSSASTKGPSVFPLAPSSKSTSGGTAALGCLVKDYFPEPVTVSWNSGALTSGVHTFPAVLQSSGLYSLSSVVTVPSSSLGTQTYICNVNHKPSNTKVDKRVEPKSCDKTHTCPPCPAPEFEGGPSVFLFPPKPKDTLMISRTPEVTCVVVDVSHEDPEVKFNWYVDGVEVHNAKTKPREEQYNSTYRVVSVLTVLHQDWLNGKEYKCKVSNKALPASIEKTISKAKGQPREPQVCTLPPSRDELTKNQVSLTCLVEGFYPSDIAVEWESNGQPENNYKTTPPVLDSDGSFFLYSDLTVDKSRWQQGNVFSCSVMHEALHNHYTQESLSLSPGK

SEQ ID NO: 275 - protein, 448 aa, Artificial Sequence
  Description of Artificial Sequence: Synthetic polypeptide
EVQLLESGGGLVQPGGSLRLSCAASGFTFSSYGMHWVRQAPGKGLEWVAVISGSGSSKYYADSVKGRFTISRDNSKNTLYLQMNSLRAEDTAVYYCARDWFYFIFDYWGQGTLVTVSSASTKGPSVFPLAPSSKSTSGGTAALGCLVKDYFPEPVTVSWNSGALTSGVHTFPAVLQSSGLYSLSSVVTVPSSSLGTQTYICNVNHKPSNTKVDKRVEPKSCDKTHTCPPCPAPEFEGGPSVFLFPPKPKDTLMISRTPEVTCVVVDVSHEDPEVKFNWYVDGVEVHNAKTKPREEQYNSTYRVVSVLTVLHQDWLNGKEYKCKVSNKALPASIEKTISKAKGQPREPQVCTLPPSRDELTKNQVSLTCLVEGFYPSDIAVEWESNGQPENNYKTTPPVLDSDGSFFLYSDLTVDKSRWQQGNVFSCSVMHEALHNHYTQESLSLSPGK

SEQ ID NO: 276 - protein, 448 aa, Artificial Sequence
  Description of Artificial Sequence: Synthetic polypeptide
EVQLLESGGGLVQPGGSLRLSCAASGFTFSSYGMHWVRQAPGKGLEWVAVISHHGSSKYYADSVKGRFTISRDNSKNTLYLQMNSLRAEDTAVYYCARDWFFYLFDYWGQGTLVTVSSASTKGPSVFPLAPSSKSTSGGTAALGCLVKDYFPEPVTVSWNSGALTSGVHTFPAVLQSSGLYSLSSVVTVPSSSLGTQTYICNVNHKPSNTKVDKRVEPKSCDKTHTCPPCPAPEFEGGPSVFLFPPKPKDTLMISRTPEVTCVVVDVSHEDPEVKFNWYVDGVEVHNAKTKPREEQYNSTYRVVSVLTVLHQDWLNGKEYKCKVSNKALPASIEKTISKAKGQPREPQVCTLPPSRDELTKNQVSLTCLVEGFYPSDIAVEWESNGQPENNYKTTPPVLDSDGSFFLYSDLTVDKSRWQQGNVFSCSVMHEALHNHYTQESLSLSPGK

SEQ ID NO: 277 - protein, 448 aa, Artificial Sequence
  Description of Artificial Sequence: Synthetic polypeptide
EVQLLESGGGLVQPGGSLRLSCAASGFTFSSYGMHWVRQAPGKGLEWVAVISHHGSSKYYADSVKGRFTISRDNSKNTLYLQMNSLRAEDTAVYYCARDWFYFIFDYWGQGTLVTVSSASTKGPSVFPLAPSSKSTSGGTAALGCLVKDYFPEPVTVSWNSGALTSGVHTFPAVLQSSGLYSLSSVVTVPSSSLGTQTYICNVNHKPSNTKVDKRVEPKSCDKTHTCPPCPAPEFEGGPSVFLFPPKPKDTLMISRTPEVTCVVVDVSHEDPEVKFNWYVDGVEVHNAKTKPREEQYNSTYRVVSVLTVLHQDWLNGKEYKCKVSNKALPASIEKTISKAKGQPREPQVCTLPPSRDELTKNQVSLTCLVEGFYPSDIAVEWESNGQPENNYKTTPPVLDSDGSFFLYSDLTVDKSRWQQGNVFSCSVMHEALHNHYTQESLSLSPGK

SEQ ID NO: 278 - protein, 448 aa, Artificial Sequence
  Description of Artificial Sequence: Synthetic polypeptide
EVQLLESGGGLVQPGGSLRLSCAASGFTFSSYGMHWVRQAPGKGLEWVAVISYDGSSKYYADSVKGRFTISRDNSKNTLYLQMNSLRAEDTAVYYCARDWFFYLFDYWGQGTLVTVSSASTKGPSVFPLAPSSKSTSGGTAALGCLVKDYFPEPVTVSWNSGALTSGVHTFPAVLQSSGLYSLSSVVTVPSSSLGTQTYICNVNHKPSNTKVDKRVEPKSCDKTHTCPPCPAPEFEGGPSVFLFPPKPKDTLMISRTPEVTCVVVDVSHEDPEVKFNWYVDGVEVHNAKTKPREEQYNSTYRVVSVLTVLHQDWLNGKEYKCKVSNKALPASIEKTISKAKGQPREPQVCTLPPSRDELTKNQVSLTCLVEGFYPSDIAVEWESNGQPENNYKTTPPVLDSDGSFFLYSDLTVDKSRWQQGNVFSCSVMHEALHNHYTQESLSLSPGK

SEQ ID NO: 279 - protein, 448 aa, Artificial Sequence
  Description of Artificial Sequence: Synthetic polypeptide
EVQLLESGGGLVQPGGSLRLSCAASGFTFSSYGMHWVRQAPGKGLEWVAVISYDGSSKYYADSVKGRFTISRDNSKNTLYLQMNSLRAEDTAVYYCARDWFYFIFDYWGQGTLVTVSSASTKGPSVFPLAPSSKSTSGGTAALGCLVKDYFPEPVTVSWNSGALTSGVHTFPAVLQSSGLYSLSSVVTVPSSSLGTQTYICNVNHKPSNTKVDKRVEPKSCDKTHTCPPCPAPEFEGGPSVFLFPPKPKDTLMISRTPEVTCVVVDVSHEDPEVKFNWYVDGVEVHNAKTKPREEQYNSTYRVVSVLTVLHQDWLNGKEYKCKVSNKALPASIEKTISKAKGQPREPQVCTLPPSRDELTKNQVSLTCLVEGFYPSDIAVEWESNGQPENNYKTTPPVLDSDGSFFLYSDLTVDKSRWQQGNVFSCSVMHEALHNHYTQESLSLSPGK

SEQ ID NO: 280 - protein, 448 aa, Artificial Sequence
  Description of Artificial Sequence: Synthetic polypeptide
EVQLLESGGGLVQPGGSLRLSCAASGFTFSSYGMHWVRQAPGKGLEWVSVISHHGSSKYYADSVKGRFTISRDNSKNTLYLQMNSLRAEDTAVYYCAKDWFFYLFDYWGQGTLVTVSSASTKGPSVFPLAPSSKSTSGGTAALGCLVKDYFPEPVTVSWNSGALTSGVHTFPAVLQSSGLYSLSSVVTVPSSSLGTQTYICNVNHKPSNTKVDKRVEPKSCDKTHTCPPCPAPEFEGGPSVFLFPPKPKDTLMISRTPEVTCVVVDVSHEDPEVKFNWYVDGVEVHNAKTKPREEQYNSTYRVVSVLTVLHQDWLNGKEYKCKVSNKALPASIEKTISKAKGQPREPQVCTLPPSRDELTKNQVSLTCLVEGFYPSDIAVEWESNGQPENNYKTTPPVLDSDGSFFLYSDLTVDKSRWQQGNVFSCSVMHEALHNHYTQESLSLSPGK

SEQ ID NO: 281 - protein, 448 aa, Artificial Sequence
  Description of Artificial Sequence: Synthetic polypeptide
EVQLLESGGGLVQPGGSLRLSCAASGFTFSSYGMHWVRQAPGKGLEWVSVISHHGSSKYYADSVKGRFTISRDNSKNTLYLQMNSLRAEDTAVYYCAKDWFYFIFDYWGQGTLVTVSSASTKGPSVFPLAPSSKSTSGGTAALGCLVKDYFPEPVTVSWNSGALTSGVHTFPAVLQSSGLYSLSSVVTVPSSSLGTQTYICNVNHKPSNTKVDKRVEPKSCDKTHTCPPCPAPEFEGGPSVFLFPPKPKDTLMISRTPEVTCVVVDVSHEDPEVKFNWYVDGVEVHNAKTKPREEQYNSTYRVVSVLTVLHQDWLNGKEYKCKVSNKALPASIEKTISKAKGQPREPQVCTLPPSRDELTKNQVSLTCLVEGFYPSDIAVEWESNGQPENNYKTTPPVLDSDGSFFLYSDLTVDKSRWQQGNVFSCSVMHEALHNHYTQESLSLSPGK

SEQ ID NO: 282 - protein, 450 aa, Artificial Sequence
  Description of Artificial Sequence: Synthetic polypeptide
EVQLQQSGPVLVKPGASVKMSCKASGFTFTDYYMNWVKQSHGKSLEWIGVINPDNGITTYNQKFKGKATLTVDKSSSTAYMELNGLTSEDSAVYYCARGVWNYERSFDYWGQGTTLTVSSASTKGPSVFPLAPSSKSTSGGTAALGCLVKDYFPEPVTVSWNSGALTSGVHTFPAVLQSSGLYSLSSVVTVPSSSLGTQTYICNVNHKPSNTKVDKRVEPKSCDKTHTCPPCPAPEFEGGPSVFLFPPKPKDTLMISRTPEVTCVVVDVSHEDPEVKFNWYVDGVEVHNAKTKPREEQYNSTYRVVSVLTVLHQDWLNGKEYKCKVSNKALPASIEKTISKAKGQPREPQVCTLPPSRDELTKNQVSLTCLVEGFYPSDIAVEWESNGQPENNYKTTPPVLDSDGSFFLYSDLTVDKSRWQQGNVFSCSVMHEALHNHYTQESLSLSPGK

SEQ ID NO: 283 - protein, 448 aa, Artificial Sequence
  Description of Artificial Sequence: Synthetic polypeptide
EVQLVESGGGLVQPGGSLRLSCAASGFTFSNYGMHWVRQAPGKGLEWVAVISHHGSSKYYADSVKGRYTISRDNSKNTLYLQMNSLRAEDTAVYYCARDWFFYLFDYWGQGTLVTVSSASTKGPSVFPLAPSSKSTSGGTAALGCLVKDYFPEPVTVSWNSGALTSGVHTFPAVLQSSGLYSLSSVVTVPSSSLGTQTYICNVNHKPSNTKVDKRVEPKSCDKTHTCPPCPAPEFEGGPSVFLFPPKPKDTLMISRTPEVTCVVVDVSHEDPEVKFNWYVDGVEVHNAKTKPREEQYNSTYRVVSVLTVLHQDWLNGKEYKCKVSNKALPASIEKTISKAKGQPREPQVCTLPPSRDELTKNQVSLTCLVEGFYPSDIAVEWESNGQPENNYKTTPPVLDSDGSFFLYSDLTVDKSRWQQGNVFSCSVMHEALHNHYTQESLSLSPGK

SEQ ID NO: 284 - protein, 448 aa, Artificial Sequence
  Description of Artificial Sequence: Synthetic polypeptide
QVQLQESGPGLVKPSETLSLTCTVSGGSISSYYWSWIRQPPGKGLEWIGYVYYSGTTNYNPSLKSRVTISVDTSKNQFSLKLSSVTAADTAVYYCASIAVTGFYFDYWGQGTLVTVSSASTKGPSVFPLAPSSKSTSGGTAALGCLVKDYFPEPVTVSWNSGALTSGVHTFPAVLQSSGLYSLSSVVTVPSSSLGTQTYICNVNHKPSNTKVDKRVEPKSCDKTHTCPPCPAPEFEGGPSVFLFPPKPKDTLMISRTPEVTCVVVDVSHEDPEVKFNWYVDGVEVHNAKTKPREEQYNSTYRVVSVLTVLHQDWLNGKEYKCKVSNKALPASIEKTISKAKGQPREPQVCTLPPSRDELTKNQVSLTCLVEGFYPSDIAVEWESNGQPENNYKTTPPVLDSDGSFFLYSDLTVDKSRWQQGNVFSCSVMHEALHNHYTQESLSLSPGK

SEQ ID NO: 285 - protein, 449 aa, Artificial Sequence
  Description of Artificial Sequence: Synthetic polypeptide
QVQLQQSGPVLVKPGASVKMSCKASGYSFTDYYVNWVKQSHGKSLEWIGIISPNDGGTNYNQKFKGKATLTVDKSSSTAYMEVNSLTSEDSAVYYCARDDDLGWYFDVWGTGTTVTVSSASTKGPSVFPLAPSSKSTSGGTAALGCLVKDYFPEPVTVSWNSGALTSGVHTFPAVLQSSGLYSLSSVVTVPSSSLGTQTYICNVNHKPSNTKVDKRVEPKSCDKTHTCPPCPAPEFEGGPSVFLFPPKPKDTLMISRTPEVTCVVVDVSHEDPEVKFNWYVDGVEVHNAKTKPREEQYNSTYRVVSVLTVLHQDWLNGKEYKCKVSNKALPASIEKTISKAKGQPREPQVCTLPPSRDELTKNQVSLTCLVEGFYPSDIAVEWESNGQPENNYKTTPPVLDSDGSFFLYSDLTVDKSRWQQGNVFSCSVMHEALHNHYTQESLSLSPGK

SEQ ID NO: 286 - protein, 448 aa, Artificial Sequence
  Description of Artificial Sequence: Synthetic polypeptide
QVQLVESGGGAVQPGRSLRLSCAASGFTFSNYGMHWVRQAPGKGLEWVAVISHHGSSKYYARSVKGRFTISRDNSKNTLYLEMNSLRAEDTAVYYCARDWWELVFDYWGQGTLVTVSSASTKGPSVFPLAPSSKSTSGGTAALGCLVKDYFPEPVTVSWNSGALTSGVHTFPAVLQSSGLYSLSSVVTVPSSSLGTQTYICNVNHKPSNTKVDKRVEPKSCDKTHTCPPCPAPEFEGGPSVFLFPPKPKDTLMISRTPEVTCVVVDVSHEDPEVKFNWYVDGVEVHNAKTKPREEQYNSTYRVVSVLTVLHQDWLNGKEYKCKVSNKALPASIEKTISKAKGQPREPQVCTLPPSRDELTKNQVSLTCLVEGFYPSDIAVEWESNGQPENNYKTTPPVLDSDGSFFLYSDLTVDKSRWQQGNVFSCSVMHEALHNHYTQESLSLSPGK

SEQ ID NO: 287 - protein, 448 aa, Artificial Sequence; identical to SEQ ID NO: 286
  Description of Artificial Sequence: Synthetic polypeptide

SEQ ID NO: 288 - protein, 448 aa, Artificial Sequence
  Description of Artificial Sequence: Synthetic polypeptide
QVQLVESGGGVVQPGRSLRLSCAASGFTFSNYGMHWVRQAPGKGLEWVAVISHHGSSKYYADSVKGRFTISRDNSKNTLYLQMNSLRAEDTAVYYCARDWFFYLFDYWGQGTLVTVSSASTKGPSVFPLAPSSKSTSGGTAALGCLVKDYFPEPVTVSWNSGALTSGVHTFPAVLQSSGLYSLSSVVTVPSSSLGTQTYICNVNHKPSNTKVDKRVEPKSCDKTHTCPPCPAPEFEGGPSVFLFPPKPKDTLMISRTPEVTCVVVDVSHEDPEVKFNWYVDGVEVHNAKTKPREEQYNSTYRVVSVLTVLHQDWLNGKEYKCKVSNKALPASIEKTISKAKGQPREPQVCTLPPSRDELTKNQVSLTCLVEGFYPSDIAVEWESNGQPENNYKTTPPVLDSDGSFFLYSDLTVDKSRWQQGNVFSCSVMHEALHNHYTQESLSLSPGK

SEQ ID NO: 289 - protein, 448 aa, Artificial Sequence
  Description of Artificial Sequence: Synthetic polypeptide
QVQLVESGGGVVQPGRSLRLSCAASGFTFSNYGMHWVRQAPGKGLEWVAVISHHGSSKYYADSVKGRFTISRDNSKNTLYLQMNSLRAEDTAVYYCARDWFYFIFDYWGQGTLVTVSSASTKGPSVFPLAPSSKSTSGGTAALGCLVKDYFPEPVTVSWNSGALTSGVHTFPAVLQSSGLYSLSSVVTVPSSSLGTQTYICNVNHKPSNTKVDKRVEPKSCDKTHTCPPCPAPEFEGGPSVFLFPPKPKDTLMISRTPEVTCVVVDVSHEDPEVKFNWYVDGVEVHNAKTKPREEQYNSTYRVVSVLTVLHQDWLNGKEYKCKVSNKALPASIEKTISKAKGQPREPQVCTLPPSRDELTKNQVSLTCLVEGFYPSDIAVEWESNGQPENNYKTTPPVLDSDGSFFLYSDLTVDKSRWQQGNVFSCSVMHEALHNHYTQESLSLSPGK

SEQ ID NO: 290 - protein, 447 aa, Artificial Sequence
  Description of Artificial Sequence: Synthetic polypeptide
QVQLVQSGAEVKKPGASVKVSCKASDYTFSNYYIEWVRQAPGQGLEWMGEILPGNGNTVYNEKFKDRVTMTVDTSTSTAYMELRSLRSDDTAVYYCARWGDYALFANWGQGTLVTVSSASTKGPSVFPLAPSSKSTSGGTAALGCLVKDYFPEPVTVSWNSGALTSGVHTFPAVLQSSGLYSLSSVVTVPSSSLGTQTYICNVNHKPSNTKVDKRVEPKSCDKTHTCPPCPAPEFEGGPSVFLFPPKPKDTLMISRTPEVTCVVVDVSHEDPEVKFNWYVDGVEVHNAKTKPREEQYNSTYRVVSVLTVLHQDWLNGKEYKCKVSNKALPASIEKTISKAKGQPREPQVCTLPPSRDELKNQVSLTCLVEGFYPSDIAVEWESNGQPENNYKTTPPVLDSDGSFFLYSDLTVDKSRWQQGNVFSCSVMHEALHNHYTQESLSLSPGK

SEQ ID NO: 291 - protein, 452 aa, Artificial Sequence
  Description of Artificial Sequence: Synthetic polypeptide
QVQLVQSGAEVKKPGASVKVSCKASGYTFTDYFMNWVRQAPGQGLEWMGVINPYNDITIYNQKFQGRVTMTVDRSTSTVYMELSSLRSEDTAVYYCAREGVLYDGYYEGAYWGQGTLVTVSSASTKGPSVFPLAPSSKSTSGGTAALGCLVKDYFPEPVTVSWNSGALTSGVHTFPAVLQSSGLYSLSSVVTVPSSSLGTQTYICNVNHKPSNTKVDKRVEPKSCDKTHTCPPCPAPEFEGGPSVFLFPPKPKDTLMISRTPEVTCVVVDVSHEDPEVKFNWYVDGVEVHNAKTKPREEQYNSTYRVVSVLTVLHQDWLNGKEYKCKVSNKALPASIEKTISKAKGQPREPQVCTLPPSRDELTKNQVSLTCLVEGFYPSDIAVEWESNGQPENNYKTTPPVLDSDGSFFLYSDLTVDKSRWQQGNVFSCSVMHEALHNHYTQESLSLSPGK

SEQ ID NO: 292 - protein, 448 aa, Artificial Sequence
  Description of Artificial Sequence: Synthetic polypeptide
QVQLVQSGAEVKKPGASVKVSCKATDYIFSNYYIEWVRQAPGQGLEWMGEILPGTGNTVYNEKFKDRVTMTVDTSTSTVYMELSSLRSEDTAVYYCARWGDYALFANWGQGTLVTVSSASTKGPSVFPLAPSSKSTSGGTAALGCLVKDYFPEPVTVSWNSGALTSGVHTFPAVLQSSGLYSLSSVVTVPSSSLGTQTYICNVNHKPSNTKVDKRVEPKSCDKTHTCPPCPAPEFEGGPSVFLFPPKPKDTLMISRTPEVTCVVVDVSHEDPEVKFNWYVDGVEVHNAKTKPREEQYNSTYRVVSVLTVLHQDWLNGKEYKCKVSNKALPASIEKTISKAKGQPREPQVCTLPPSRDELTKNQVSLTCLVEGFYPSDIAVEWESNGQPENNYKTTPPVLDSDGSFFLYSDLTVDKSRWQQGNVFSCSVMHEALHNHYTQESLSLSPGK

SEQ ID NO: 293 - protein, 446 aa, Artificial Sequence
  Description of Artificial Sequence: Synthetic polypeptide
SDVQLQESGPGLVKPSQSLSLTCSVTGYSITSAYYWNWIRQFPGNKLEWMGYISDVGHNYYNPSLKNRISITRDTSKNQFFLKLNSVTPEDTATYYCARDQVFAYWGQGTLVTVSAASTKGPSVFPLAPSSKSTSGGTAALGCLVKDYFPEPVTVSWNSGALTSGVHTFPAVLQSSGLYSLSSVVTVPSSSLGTQTYICNVNHKPSNTKVDKRVEPKSCDKTHTCPPCPAPEFEGGPSVFLFPPKPKDTLMISRTPEVTCVVVDVSHEDPEVKFNWYVDGVEVHNAKTKPREEQYNSTYRVVSVLTVLHQDWLNGKEYKCKVSNKALPASIEKTISKAKGQPREPQVCTLPPSRDELTKNQVSLTCLVEGFYPSDIAVEWESNGQPENNYKTTPPVLDSDGSFFLYSDLTVDKSRWQQGNVFSCSVMHEALHNHYTQESLSLSPGK

SEQ ID NO: 294 - protein, 446 aa, Artificial Sequence
  Description of Artificial Sequence: Synthetic polypeptide
SDVQLQESGPGLVKPSQSLSLTCSVTGYSITSAYYWNWIRQFPGNKLEWMGYISDVGSNNYNPSLKNRISITRDTFKNQFFLKLNSVTTEDTATYFCTRDQVFAYWGQGTLVTVSAASTKGPSVFPLAPSSKSTSGGTAALGCLVKDYFPEPVTVSWNSGALTSGVHTFPAVLQSSGLYSLSSVVTVPSSSLGTQTYICNVNHKPSNTKVDKRVEPKSCDKTHTCPPCPAPEFEGGPSVFLFPPKPKDTLMISRTPEVTCVVVDVSHEDPEVKFNWYVDGVEVHNAKTKPREEQYNSTYRVVSVLTVLHQDWLNGKEYKCKVSNKALPASIEKTISKAKGQPREPQVCTLPPSRDELTKNQVSLTCLVEGFYPSDIAVEWESNGQPENNYKTTPPVLDSDGSFFLYSDLTVDKSRWQQGNVFSCSVMHEALHNHYTQESLSLSPGK

SEQ ID NO: 295 - protein, 214 aa, Artificial Sequence
  Description of Artificial Sequence: Synthetic polypeptide
DIQLTQSPSFLSASVGDRVTITCKASQNVGIAVAWYQQKPGKAPKLLIYAASNRYTGVPSRFSGSGSGTEFTLTISSLQPEDFATYYCQQYSTYPYTFGQGTKLEIKRTVAAPSVFIFPPSDEQLKSGTASVVCLLNNFYPREAKVQWKVDNALQSGNSQESVTEQDSKDSTYSLSSTLTLSKADYEKHKVYACEVTHQGLSSPVTKSFNRGEC

SEQ ID NO: 296 - protein, 214 aa, Artificial Sequence
  Description of Artificial Sequence: Synthetic polypeptide
DIQMTQSPSFLSASVGDRVTITCKASQNVGTNVAWYQQKPGKAPKPLIYSTSYRYSGVPSRFSGSGSGTEFTLTISSLQPEDFATYYCQQYNNYPLTFGGGTKVEIKRTVAAPSVFIFPPSDEQLKSGTASVVCLLNNFYPREAKVQWKVDNALQSGNSQESVTEQDSKDSTYSLSSTLTLSKADYEKHKVYACEVTHQGLSSPVTKSFNRGEC

SEQ ID NO: 297 - protein, 219 aa, Artificial Sequence
  Description of Artificial Sequence: Synthetic polypeptide
DIQMTQSPSSLSASVGDRVTITCKSSQSLLHSDAKTFLYWYQQKPGKAPKLLIYEVSNRFSGVPSRFSGSGSGTDFTLTISSLQPEDFATYYCLQGERLPFTFGQGTKVEIKRTVAAPSVFIFPPSDEQLKSGTASVVCLLNNFYPREAKVQWKVDNALQSGNSQESVTEQDSKDSTYSLSSTLTLSKADYEKHKVYACEVTHQGLSSPVTKSFNRGEC

SEQ ID NO: 298 - protein, 214 aa, Artificial Sequence
  Description of Artificial Sequence: Synthetic polypeptide
DIQMTQSPSTLSASVGDRVTITCKASQNVGTNVAWYQQKPGKAPKALIYSASYRYSGVPSRFSGSGSGTEFTLTISSLQPDDFATYYCQQYNSYPFTFGQGTKLEIKRTVAAPSVFIFPPSDEQLKSGTASVVCLLNNFYPREAKVQWKVDNALQSGNSQESVTEQDSKDSTYSLSSTLTLSKADYEKHKVYACEVTHQGLSSPVTKSFNRGEC

SEQ ID NO: 299 - protein, 219 aa, Artificial Sequence
  Description of Artificial Sequence: Synthetic polypeptide
DIVMTQAAFSNPVTVGTSASISCRSSKSLLHSNGITYLYWYLQKPGQSPQLLIYQMSNLASGVPDRFSSSGSGTDFTLRISRVEAEDVGVYYCAQNLELPWTFGGGTKLEIKRTVAAPSVFIFPPSDEQLKSGTASVVCLLNNFYPREAKVQWKVDNALQSGNSQESVTEQDSKDSTYSLSSTLTLSKADYEKHKVYACEVTHQGLSSPVTKSFNRGEC

SEQ ID NO: 300 - protein, 215 aa, Artificial Sequence
  Description of Artificial Sequence: Synthetic polypeptide
DIVMTQSPKFMSTSVGDRVSVTCKASQNVGTNVAWYQQKPGQSPKALIYSASYRYSGVPDRFTGSGSGTDFTLTFSSVQSEDLAEYFCQQYNNYPLTFGGGTKLEIKRRTVAAPSVFIFPPSDEQLKSGTASVVCLLNNFYPREAKVQWKVDNALQSGNSQESVTEQDSKDSTYSLSSTLTLSKADYEKHKVYACEVTHQGLSSPVTKSFNRGEC

SEQ ID NO: 301 - protein, 219 aa, Artificial Sequence
  Description of Artificial Sequence: Synthetic polypeptide
DIVMTQSPLSLPVTPGEPASISCKSSQSLLHSDAKTFLYWYLQKPGQSPQLLIYEVSNRFSGVPDRFSGSGSGTDFTLKISRVEAEDVGVYYCLQGRELPFTFGQGTKVEIKRTVAAPSVFIFPPSDEQLKSGTASVVCLLNNFYPREAKVQWKVDNALQSGNSQESVTEQDSKDSTYSLSSTLTLSKADYEKHKVYACEVTHQGLSSPVTKSFNRGEC

SEQ ID NO: 302 - protein, 219 aa, Artificial Sequence
  Description of Artificial Sequence: Synthetic polypeptide
DIVMTQSPLSLPVTPGEPASISCKSSQSLLHSDGKTFLYWYLQKPGQSPQLLIYEVSNRFSGVPDRFSGSGSGTDFTLKISRVEAEDVGVYYCLQGERLPFTFGQGTKVEIKRTVAAPSVFIFPPSDEQLKSGTASVVCLLNNFYPREAKVQWKVDNALQSGNSQESVTEQDSKDSTYSLSSTLTLSKADYEKHKVYACEVTHQGLSSPVTKSFNRGEC

SEQ ID NO: 303 - protein, 219 aa, Artificial Sequence
  Description of Artificial Sequence: Synthetic polypeptide
DIVMTQSPLSLPVTPGEPASISCRSSQSLLHSDAKTFLDWYLQKPGQSPQLLIYEVSNRASGVPDRFSGSGSGTDFTLKISRVEAEDVGVYYCLQGRELPFTFGQGTKVEIKRTVAAPSVFIFPPSDEQLKSGTASVVCLLNNFYPREAKVQWKVDNALQSGNSQESVTEQDSKDSTYSLSSTLTLSKADYEKHKVYACEVTHQGLSSPVTKSFNRGEC

SEQ ID NO: 304 - protein, 219 aa, Artificial Sequence
  Description of Artificial Sequence: Synthetic polypeptide
DIVMTQSPLSLPVTPGEPASISCRSSQSLLHSDGKTFLDWYLQKPGQSPQLLIYEVSNRASGVPDRFSGSGSGTDFTLKISRVEAEDVGVYYCLQGERLPFTFGQGTKVEIKRTVAAPSVFIFPPSDEQLKSGTASVVCLLNNFYPREAKVQWKVDNALQSGNSQESVTEQDSKDSTYSLSSTLTLSKADYEKHKVYACEVTHQGLSSPVTKSFNRGEC

SEQ ID NO: 305 - protein, 219 aa, Artificial Sequence
  Description of Artificial Sequence: Synthetic polypeptide
DIVMTQTPLSLSVTPGQPASISCKSSQSLLHSDAKTFLYWYLQKPGQPPQLLIYEVSNRFSGVPDRFSGSGSGTDFTLKISRVEAEDVGVYYCLQGRELPFTFGPGTKVEIKRTVAAPSVFIFPPSDEQLKSGTASVVCLLNNFYPREAKVQWKVDNALQSGNSQESVTEQDSKDSTYSLSSTLTLSKADYEKHKVYACEVTHQGLSSPVTKSFNRGEC

SEQ ID NO: 306 - protein, 231 aa, Artificial Sequence
  Description of Artificial Sequence: Synthetic polypeptide
DIVMTQTPLSLSVTPGQPASISCKSSQSLLHSDAKTFLYWYLQKPGQPPQLLIYEVSNRFSGVPDRFSGSGSGTDFTLKISRVEAEDVGVYYCLQGRELPFTFGPGTKVEIKSTFGQGTKVEIKRTVAAPSVFIFPPSDEQLKSGTASVVCLLNNFYPREAKVQWKVDNALQSGNSQESVTEQDSKDSTYSLSSTLTLSKADYEKHKVYACEVTHQGLSSPVTKSFNRGEC

SEQ ID NO: 307 - protein, 219 aa, Artificial Sequence
  Description of Artificial Sequence: Synthetic polypeptide
DIVMTQTPLSLSVTPGQPASISCKSSQSLLHSDGKTFLYWYLQKPGQPPQLLIYEVSNRFSGVPDRFSGSGSGTDFTLKISRVEAEDVGVYYCLQGERLPFTFGPGTKVEIKRTVAAPSVFIFPPSDEQLKSGTASVVCLLNNFYPREAKVQWKVDNALQSGNSQESVTEQDSKDSTYSLSSTLTLSKADYEKHKVYACEVTHQGLSSPVTKSFNRGEC

SEQ ID NO: 308 - protein, 231 aa, Artificial Sequence
  Description of Artificial Sequence: Synthetic polypeptide
DIVMTQTPLSLSVTPGQPASISCKSSQSLLHSDGKTFLYWYLQKPGQPPQLLIYEVSNRFSGVPDRFSGSGSGTDFTLKISRVEAEDVGVYYCLQGERLPFTFGPGTKVEIKSTFGQGTKVEIKRTVAAPSVFIFPPSDEQLKSGTASVVCLLNNFYPREAKVQWKVDNALQSGNSQESVTEQDSKDSTYSLSSTLTLSKADYEKHKVYACEVTHQGLSSPVTKSFNRGEC

SEQ ID NO: 309 - protein, 219 aa, Artificial Sequence
  Description of Artificial Sequence: Synthetic polypeptide
DIVMTQTPLSLSVTPGQPASISCKSSQSLLHSDGKTFLYWYLQKPGQPPQLLIYEVSNRFSGVPDRFSGSGSGTDFTLKISRVEAEDVGVYYCLQGIHLPFTFGPGTKVEIKRTVAAPSVFIFPPSDEQLKSGTASVVCLLNNFYPREAKVQWKVDNALQSGNSQESVTEQDSKDSTYSLSSTLTLSKADYEKHKVYACEVTHQGLSSPVTKSFNRGEC

SEQ ID NO: 310 - protein, 231 aa, Artificial Sequence
  Description of Artificial Sequence: Synthetic polypeptide
DIVMTQTPLSLSVTPGQPASISCKSSQSLLHSDGKTFLYWYLQKPGQPPQLLIYEVSNRFSGVPDRFSGSGSGTDFTLKISRVEAEDVGVYYCLQGIHLPFTFGPGTKVEIKSTFGQGTKVEIKRTVAAPSVFIFPPSDEQLKSGTASVVCLLNNFYPREAKVQWKVDNALQSGNSQESVTEQDSKDSTYSLSSTLTLSKADYEKHKVYACEVTHQGLSSPVTKSFNRGEC

SEQ ID NO: 311 - protein, 218 aa, Artificial Sequence
  Description of Artificial Sequence: Synthetic polypeptide
DTVLTQSPASLAVSLGQRATISCRASESVHSYGNSLIHWYQQKPGQPPRLLIYRASNLESGIPARFSGSGSRTDFTLTINPVEADDVATYYCQQTNEDPLTFGAGTKLELKRTVAAPSVFIFPPSDEQLKSGTASVVCLLNNFYPREAKVQWKVDNALQSGNSQESVTEQDSKDSTYSLSSTLTLSKADYEKHKVYACEVTHQGLSSPVTKSFNRGEC

SEQ ID NO: 312 - protein, 215 aa, Artificial Sequence
  Description of Artificial Sequence: Synthetic polypeptide
EIVLTQSPGTLSLSPGERVTLSCRASQRVNNNYLAWYQQRPGQAPRLLIYGASSRATGIPDRFSGSGSGTDFTLTISRLEPEDFAVYYCQQYDRSPLTFGGGTKLEIKRTVAAPSVFIFPPSDEQLKSGTASVVCLLNNFYPREAKVQWKVDNALQSGNSQESVTEQDSKDSTYSLSSTLTLSKADYEKHKVYACEVTHQGLSSPVTKSFNRGEC

SEQ ID NO: 313 - protein, 213 aa, Artificial Sequence
  Description of Artificial Sequence: Synthetic polypeptide
QIVLTQSPAIMSASPGEKVTMTCSASSSVSYMHWYQQKSGTSPKRWIYDTSKLASGVPARFSGSGSGTSYSLTISSMEAEDAATYYCQQWSSNPLTFGAGTKLELKRTVAAPSVFIFPPSDEQLKSGTASVVCLLNNFYPREAKVQWKVDNALQSGNSQESVTEQDSKDSTYSLSSTLTLSKADYEKHKVYACEVTHQGLSSPVTKSFNRGEC

SEQ ID NO: 314 - protein, 1 aa, Artificial Sequence
  Description of Artificial Sequence: Synthetic peptide
G

SEQ ID NO: 315 - protein, 2 aa, Artificial Sequence
  Description of Artificial Sequence: Synthetic peptide
GS

SEQ ID NO: 316 - protein, 3 aa, Artificial Sequence
  Description of Artificial Sequence: Synthetic peptide
GSS

SEQ ID NO: 317 - protein, 5 aa, Artificial Sequence
  Description of Artificial Sequence: Synthetic peptide
GSSSG

SEQ ID NO: 318 - protein, 5 aa, Artificial Sequence
  Description of Artificial Sequence: Synthetic peptide
GGGGS

SEQ ID NO: 319 - protein, 10 aa, Artificial Sequence
  Description of Artificial Sequence: Synthetic peptide
GGGGSGGGGS

SEQ ID NO: 320 - protein, 15 aa, Artificial Sequence
  Description of Artificial Sequence: Synthetic peptide
GGGGSGGGGSGGGGS

SEQ ID NO: 321 - protein, 20 aa, Artificial Sequence
  Description of Artificial Sequence: Synthetic peptide
GGGGSGGGGSGGGGSGGGGS

SEQ ID NO: 322 - protein, 25 aa, Artificial Sequence
  Description of Artificial Sequence: Synthetic peptide
GGGGSGGGGSGGGGSGGGGSGGGGS

SEQ ID NO: 323 - protein, 7 aa, Artificial Sequence
  Description of Artificial Sequence: Synthetic peptide
PGGGGSP

SEQ ID NO: 324 - protein, 19 aa, Artificial Sequence
  Description of Artificial Sequence: Synthetic peptide
PGGGGSPGGGGSPGGGGSP

SEQ ID NO: 325 - protein, 7 aa, Artificial Sequence
  Description of Artificial Sequence: Synthetic peptide
GEPGSGE

SEQ ID NO: 326 - protein, 14 aa, Artificial Sequence
  Description of Artificial Sequence: Synthetic peptide
GEPGSGEGEPGSGE

SEQ ID NO: 327 - protein, 22 aa, Artificial Sequence
  Description of Artificial Sequence: Synthetic peptide
GEPGSGEGEPGSGEEGEPGSGE

SEQ ID NO: 328 - protein, 32 aa, Artificial Sequence
  Description of Artificial Sequence: Synthetic polypeptide
EGEPGSGEEGEPGSGEEGEPGSGEEGEPGSGE

SEQ ID NO: 329 - protein, 5 aa, Artificial Sequence
  Description of Artificial Sequence: Synthetic peptide
GKPGS

SEQ ID NO: 330 - protein, 10 aa, Artificial Sequence
  Description of Artificial Sequence: Synthetic peptide
GKPGSGKPGS

SEQ ID NO: 331 - protein, 15 aa, Artificial Sequence
  Description of Artificial Sequence: Synthetic peptide
GKPGSGKPGSGKPGS

SEQ ID NO: 332 - protein, 20 aa, Artificial Sequence
  Description of Artificial Sequence: Synthetic peptide
GKPGSGKPGSGKPGSGKPGS

SEQ ID NO: 333 - protein, 25 aa, Artificial Sequence
  Description of Artificial Sequence: Synthetic peptide
GKPGSGKPGSGKPGSGKPGSGKPGS

SEQ ID NO: 334 - protein, 5 aa, Artificial Sequence
  Description of Artificial Sequence: Synthetic peptide
SSSSG

SEQ ID NO: 335 - protein, 10 aa, Artificial Sequence
  Description of Artificial Sequence: Synthetic peptide
SSSSGSSSSG

SEQ ID NO: 336 - protein, 15 aa, Artificial Sequence
  Description of Artificial Sequence: Synthetic peptide
SSSSGSSSSGSSSSG

SEQ ID NO: 337 - protein, 20 aa, Artificial Sequence
  Description of Artificial Sequence: Synthetic peptide
SSSSGSSSSGSSSSGSSSSG

SEQ ID NO: 338 - protein, 19 aa, Artificial Sequence
  Description of Artificial Sequence: Synthetic peptide
GRPGSGPGSGRPGSGRPGS

SEQ ID NO: 339 - protein, 24 aa, Artificial Sequence
  Description of Artificial Sequence: Synthetic peptide
GRPGSGPGSGRPGSGRPGSGRGPS

SEQ ID NO: 340 - protein, 20 aa, Artificial Sequence
  Description of Artificial Sequence: Synthetic peptide
GKPGSGRPGSGKGPSGRPGS

SEQ ID NO: 341 - protein, 731 aa, Artificial Sequence
  Description of Artificial Sequence: Synthetic polypeptide
QVQLVQSGAEVKKPGASVKVSCKASDYTFSNYYIEWVRQAPGQGLEWMGEILPGNGNTVYNEKFKDRVTMTVDTSTSTAYMELRSLRSDDTAVYYCARWGDYALFANWGQGTLVTVSSGGGGSGGGGSGGGGSDIQMTQSPSTLSASVGDRVTITCKASQNVGTNVAWYQQKPGKAPKALIYSASYRYSGVPSRFSGSGSGTEFTLTISSLQPDDFATYYCQQYNSYPFTFGQGTKLEIKSGGGSEVQLVESGGGLVQPGGSLRLSCAASGFTFSTYAMNWVRQAPGKGLEWVGRIRSKYNNYATYYADSVKGRFTISRDDSKNTLYLQMNSLRAEDTAVYYCVRHGNFGDSYVSWFAYWGQGTLVTVSSGKPGSGKPGSGKPGSGKPGSQAVVTQEPSLTVSPGGTVTLTCGSSTGAVTTSNYANWVQQKPGKSPRGLIGGTNKRAPGVPARFSGSLLGGKAALTISGAQPEDEADYYCALWYSNHWVFGGGTKLTVLEPKSSDKTHTCPPCPAPEFEGGPSVFLFPPKPKDTLMISRTPEVTCVVVDVSHEDPEVKFNWYVDGVEVHNAKTKPREEQYNSTYRVVSVLTVLHQDWLNGKEYKCKVSNKALPASIEKTISKAKGQPREPQVYTLPPCRKKLTKNQVSLTCLVKGFYPSDIAVEWESNGQPENNYKTTPPVLKSDGSFFLYSKLTVDKSRWQQGNVFSCSVMHEALHNHYTQKSLSLSPGK

SEQ ID NO: 342 - protein, 731 aa, Artificial Sequence
  Description of Artificial Sequence: Synthetic polypeptide
QVQLVQSGAEVKKPGASVKVSCKATDYIFSNYYIEWVRQAPGQGLEWMGEILPGTGNTVYNEKFKDRVTMTVDTSTSTVYMELSSLRSEDTAVYYCARWGDYALFANWGQGTLVTVSSGGGGSGGGGSGGGGSDIQMTQSPSTLSASVGDRVTITCKASQNVGTNVAWYQQKPGKAPKALIYSASYRYSGVPSRFSGSGSGTEFTLTISSLQPDDFATYYCQQYNSYPFTFGQGTKLEIKSGGGSEVQLVESGGGLVQPGGSLRLSCAASGFTFSTYAMNWVRQAPGKGLEWVGRIRSKYNNYATYYADSVKGRFTISRDDSKNTLYLQMNSLRAEDTAVYYCVRHGNFGDSYVSWFAYWGQGTLVTVSSGKPGSGKPGSGKPGSGKPGSQAVVTQEPSLTVSPGGTVTLTCGSSTGAVTTSNYANWVQQKPGKSPRGLIGGTNKRAPGVPARFSGSLLGGKAALTISGAQPEDEADYYCALWYSNHWVFGGGTKLTVLEPKSSDKTHTCPPCPAPEFEGGPSVFLFPPKPKDTLMISRTPEVTCVVVDVSHEDPEVKFNWYVDGVEVHNAKTKPREEQYNSTYRVVSVLTVLHQDWLNGKEYKCKVSNKALPASIEKTISKAKGQPREPQVYTLPPCRKKLTKNQVSLTCLVKGFYPSDIAVEWESNGQPENNYKTTPPVLKSDGSFFLYSKLTVDKSRWQQGNVFSCSVMHEALHNHYTQKSLSLSPGK

SEQ ID NO: 343 - protein, 735 aa, Artificial Sequence
  Description of Artificial Sequence: Synthetic polypeptide
QVQLVQSGAEVKKPGASVKVSCKASGYTFTDYFMNWVRQAPGQGLEWMGVINPYNDITIYNQKFQGRVTMTVDRSTSTVYMELSSLRSEDTAVYYCAREGVLYDGYYEGAYWGQGTLVTVSSGGGGSGGGGSGGGGSDIQLTQSPSFLSASVGDRVTITCKASQNVGIAVAWYQQKPGKAPKLLIYAASNRYTGVPSRFSGSGSGTEFTLTISSLQPEDFATYYCQQYSTYPYTFGQGTKLEIKSGGGSEVQLVESGGGLVQPGGSLRLSCAASGFTFSTYAMNWVRQAPGKGLEWVGRIRSKYNNYATYYADSVKGRFTISRDDSKNTLYLQMNSLRAEDTAVYYCVRHGNFGDSYVSWFAYWGQGTLVTVSSGKPGSGKPGSGKPGSGKPGSQAVVTQEPSLTVSPGGTVTLTCGSSTGAVTTSNYANWVQQKPGKSPRGLIGGTNKRAPGVPARFSGSLLGGKAALTISGAQPEDEADYYCALWYSNHWVFGGGTKLTVLEPKSSDKTHTCPPCPAPEFEGGPSVFLFPPKPKDTLMISRTPEVTCVVVDVSHEDPEVKFNWYVDGVEVHNAKTKPREEQYNSTYRVVSVLTVLHQDWLNGKEYKCKVSNKALPASIEKTISKAKGQPREPQVYTLPPCRKKLTKNQVSLTCLVKGFYPSDIAVEWESNGQPENNYKTTPPVLKSDGSFFLYSKLTVDKSRWQQGNVFSCSVMHEALHNHYTQKSLSLSPGK

SEQ ID NO: 344 - protein, 735 aa, Artificial Sequence
  Description of Artificial Sequence: Synthetic polypeptide
QVQLVQSGAEVKKPGASVKVSCKASGYTFTDYFMNWVRQAPGQCLEWMGVINPYNDITIYNQKFQGRVTMTVDRSTSTVYMELSSLRSEDTAVYYCAREGVLYDGYYEGAYWGQGTLVTVSSGGGGSGGGGSGGGGSDIQLTQSPSFLSASVGDRVTITCKASQNVGIAVAWYQQKPGKAPKLLIYAASNRYTGVPSRFSGSGSGTEFTLTISSLQPEDFATYYCQQYSTYPYTFGCGTKLEIKSGGGSEVQLVESGGGLVQPGGSLRLSCAASGFTFSTYAMNWVRQAPGKGLEWVGRIRSKYNNYATYYADSVKGRFTISRDDSKNTLYLQMNSLRAEDTAVYYCVRHGNFGDSYVSWFEYWGQGTLVTVSSGKPGSGKPGSGKPGSGKPGSQAVVTQEPSLTVSPGGTVTLTCGSSTGAVTTSNYANWVQQKPGKSPRGLIGGTNKRAPGVPARFSGSLLGGKAALTISGAQPEDEADYYCALWYSNHWVFGGGTKLTVLEPKSSDKTHTCPPCPAPEFEGGPSVFLFPPKPKDTLMISRTPEVTCVVVDVSHEDPEVKFNWYVDGVEVHNAKTKPREEQYNSTYRVVSVLTVLHQDWLNGKEYKCKVSNKALPASIEKTISKAKGQPREPQVYTLPPCRKKLTKNQVSLTCLVKGFYPSDIAVEWESNGQPENNYKTTPPVLKSDGSFFLYSKLTVDKSRWQQGNVFSCSVMHEALHNHYTQKSLSLSPGK

SEQ ID NO: 345 - protein, 731 aa, Artificial Sequence
  Description of Artificial Sequence: Synthetic polypeptide
QVQLVQSGAEVKKPGASVKVSCKATDYIFSNYYIEWVRQAPGQGLEWMGEILPGTGNTVYNEKFKDRVTMTVDTSTSTVYMELSSLRSEDTAVYYCARWGDYALFANWGQGTLVTVSSGGGGSGGGGSGGGGSDIQMTQSPSFLSASVGDRVTITCKASQNVGTNVAWYQQKPGKAPKPLIYSTSYRYSGVPSRFSGSGSGTEFTLTISSLQPEDFATYYCQQYNNYPLTFGGGTKVEIKSGGGSEVQLVESGGGLVQPGGSLRLSCAASGFTFSTYAMNWVRQAPGKGLEWVGRIRSKYNNYATYYADSVKGRFTISRDDSKNTLYLQMNSLRAEDTAVYYCVRHGNFGDSYVSWFAYWGQGTLVTVSSGKPGSGKPGSGKPGSGKPGSQAVVTQEPSLTVSPGGTVTLTCGSSTGAVTTSNYANWVQQKPGKSPRGLIGGTNKRAPGVPARFSGSLLGGKAALTISGAQPEDEADYYCALWYSNHWVFGGGTKLTVLEPKSSDKTHTCPPCPAPEFEGGPSVFLFPPKPKDTLMISRTPEVTCVVVDVSHEDPEVKFNWYVDGVEVHNAKTKPREEQYNSTYRVVSVLTVLHQDWLNGKEYKCKVSNKALPASIEKTISKAKGQPREPQVYTLPPCRKKLTKNQVSLTCLVKGFYPSDIAVEWESNGQPENNYKTTPPVLKSDGSFFLYSKLTVDKSRWQQGNVFSCSVMHEALHNHYTQKSLSLSPGK

SEQ ID NO: 346 - protein, 735 aa, Artificial Sequence; identical to SEQ ID NO: 343
  Description of Artificial Sequence: Synthetic polypeptide

SEQ ID NO: 347 - protein, 735 aa, Artificial Sequence
  Description of Artificial Sequence: Synthetic polypeptide
QVQLVQSGAEVKKPGASVKVSCKASGYTFTDYFMNWVRQAPGQGLEWMGVINPYNDITIYNQKFQGRVTMTVDRSTSTVYMELSSLRSEDTAVYYCAREGVLYDGYYEGAYWGQGTLVTVSSGGGGSGGGGSGGGGSDIQLTQSPSFLSASVGDRVTITCKASQNVGIAVAWYQQKPGKAPKLLIYAASNRYTGVPSRFSGSGSGTEFTLTISSLQPEDFATYYCQQYSTYPYTFGQGTKLEIKSGGGSEVQLVESGGGLVQPGGSLRLSCAASGFTFSTYAMNWVRQAPGKGLEWVGRIRSKYNNYATYYADSVKGRFTISRDDSKNTLYLQMNSLRAEDTAVYYCVRHGNFGDSYVSWFEYWGQGTLVTVSSGKPGSGKPGSGKPGSGKPGSQAVVTQEPSLTVSPGGTVTLTCGSSTGAVTTSNYANWVQQKPGKSPRGLIGGTNKRAPGVPARFSGSLLGGKAALTISGAQPEDEADYYCALWYSNHWVFGGGTKLTVLEPKSSDKTHTCPPCPAPEFEGGPSVFLFPPKPKDTLMISRTPEVTCVVVDVSHEDPEVKFNWYVDGVEVHNAKTKPREEQYNSTYRVVSVLTVLHQDWLNGKEYKCKVSNKALPASIEKTISKAKGQPREPQVYTLPPCRKKLTKNQVSLTCLVKGFYPSDIAVEWESNGQPENNYKTTPPVLKSDGSFFLYSKLTVDKSRWQQGNVFSCSVMHEALHNHYTQKSLSLSPGK

SEQ ID NO: 348 - protein, 735 aa, Artificial Sequence
  Description of Artificial Sequence: Synthetic polypeptide
QVQLVQSGAEVKKPGASVKVSCKASGYTFTDYFMNWVRQAPGQGLEWMGVINPYNDITIYNQKFQGRVTMTVDRSTSTVYMELSSLRSEDTAVYYCAREGVLYDGYYEGAYWGQGTLVTVSSGGGGSGGGGSGGGGSDIQLTQSPSFLSASVGDRVTITCKASQNVGIAVAWYQQKPGKAPKLLIYAASNRYTGVPSRFSGSGSGTEFTLTISSLQPEDFATYYCQQYSTYPYTFGQGTKLEIKSGGGSEVQLVESGGGLVQPGGSLRLSCAASGFTFSTYAMNWVRQAPGKGLEWVGRIRSKYNNYATYYADSVKGRFTISRDDSKNTLYLQMNSLRAEDTAVYYCVRHGNFGDSYVSWFNYWGQGTLVTVSSGKPGSGKPGSGKPGSGKPGSQAVVTQEPSLTVSPGGTVTLTCGSSTGAVTTSNYANWVQQKPGKSPRGLIGGTNKRAPGVPARFSGSLLGGKAALTISGAQPEDEADYYCALWYSNHWVFGGGTKLTVLEPKSSDKTHTCPPCPAPEFEGGPSVFLFPPKPKDTLMISRTPEVTCVVVDVSHEDPEVKFNWYVDGVEVHNAKTKPREEQYNSTYRVVSVLTVLHQDWLNGKEYKCKVSNKALPASIEKTISKAKGQPREPQVYTLPPCRKKLTKNQVSLTCLVKGFYPSDIAVEWESNGQPENNYKTTPPVLKSDGSFFLYSKLTVDKSRWQQGNVFSCSVMHEALHNHYTQKSLSLSPGK

SEQ ID NO: 349 - protein, 733 aa, Artificial Sequence
  Description of Artificial Sequence: Synthetic polypeptide
EVQLVQSGAEVKKPGESLKISCKGSGYEFSSHWMNWVRQMPGKCLEWMGQIYPGDGDINYNEKFRGQVTISADKSISTAYLQWSSLKASDTAMYYCARHGNYVMDYWGQGTLVTVSSGGGGSGGGGSGGGGSGGGGSIQLTQSPSFLSASVGDRVTITCSASSSVSYMFWYQQKPGKAPKPWIYRTSNLASGVPSRFSGSGSGTEFTLTISSLQPEDFATYYCQQFHDYPRTFGCGTKVEIKSGGGSEVQLVESGGGLVQPGGSLRLSCAASGFTFSTYAMNWVRQAPGKGLEWVGRIRSKYNNYATYYADSVKGRFTISRDDSKNTLYLQMNSLRAEDTAVYYCVRHGNFGDSYVSWFEYWGQGTLVTVSSGKPGSGKPGSGKPGSGKPGSQAVVTQEPSLTVSPGGTVTLTCGSSTGAVTTSNYANWVQQKPGKSPRGLIGGTNKRAPGVPARFSGSLLGGKAALTISGAQPEDEADYYCALWYSNHWVFGGGTKLTVLEPKSSDKTHTCPPCPAPEFEGGPSVFLFPPKPKDTLMISRTPEVTCVVVDVSHEDPEVKFNWYVDGVEVHNAKTKPREEQYNSTYRVVSVLTVLHQDWLNGKEYKCKVSNKALPASIEKTISKAKGQPREPQVYTLPPCRKKLTKNQVSLTCLVKGFYPSDIAVEWESNGQPENNYKTTPPVLKSDGSFFLYSKLTVDKSRWQQGNVFSCSVMHEALHNHYTQKSLSLSPGK

SEQ ID NO: 350 - protein, 733 aa, Artificial Sequence
  Description of Artificial Sequence: Synthetic polypeptide
EVQLVQSGAEVKKPGESLKISCKGSGYEFSSHWMNWVRQMPGKGLEWMGQIYPGDGDINYNEKFRGQVTISADKSISTAYLQWSSLKASDTAMYYCARHGNYVMDYWGQGTLVTVSSGGGGSGGGGSGGGGSGGGGSIQLTQSPSFLSASVGDRVTITCSASSSVSYMFWYQQKPGKAPKPWIYRTSNLASGVPSRFSGSGSGTEFTLTISSLQPEDFATYYCQQFHDYPRTFGGGTKVEIKSGGGSEVQLVESGGGLVQPGGSLRLSCAASGFTFSTYAMNWVRQAPGKGLEWVGRIRSKYNNYATYYADSVKGRFTISRDDSKNTLYLQMNSLRAEDTAVYYCVRHGNFGDSYVSWFAYWGQGTLVTVSSGKPGSGKPGSGKPGSGKPGSQAVVTQEPSLTVSPGGTVTLTCGSSTGAVTTSNYANWVQQKPGKSPRGLIGGTNKRAPGVPARFSGSLLGGKAALTISGAQPEDEADYYCALWYSNHWVFGGGTKLTVLEPKSSDKTHTCPPCPAPEFEGGPSVFLFPPKPKDTLMISRTPEVTCVVVDVSHEDPEVKFNWYVDGVEVHNAKTKPREEQYNSTYRVVSVLTVLHQDWLNGKEYKCKVSNKALPASIEKTISKAKGQPREPQVYTLPPCRKKLTKNQVSLTCLVKGFYPSDIAVEWESNGQPENNYKTTPPVLKSDGSFFLYSKLTVDKSRWQQGNVFSCSVMHEALHNHYTQKSLSLSPGK

SEQ ID NO: 351 - protein, 984 aa, Artificial Sequence
  Description of Artificial Sequence: Synthetic polypeptide
QVQLQQWGAGLLKPSETLSLTCAVYGGSFSGYYWSWIRQPPGKCLEWIGDIDASGSTKYNPSLKSRVTISLDTSKNQFSLKLNSVTAADTAVYFCARKKYSTVWSYFDNWGQGTLVTVSSGGGGSGGGGSGGGGSSYELTQPSSVSVPPGQTASITCSGDKLGDKYASWYQQKPGQSPVLVIYQDRKRPSGVPERFSGSNSGNTATLTISGTQAMDEADYYCQAWGSSTAVFGCGTKLTVLSGGGGSEVQLVESGGGLVQPGGSLKLSCAASGFTFNKYAMNWVRQAPGKGLEWVARIRSKYNNYATYYADSVKDRFTISRDDSKNTAYLQMNNLKTEDTAVYYCVRHGNFGNSYISYWAYWGQGTLVTVSSGGGGSGGGGSGGGGSQTVVTQEPSLTVSPGGTVTLTCGSSTGAVTSGNYPNWVQQKPGQAPRGLIGGTKFLAPGTPARFSGSLLGGKAALTLSGVQPEDEAEYYCVLWYSNRWVFGGGTKLTVLGGGGDKTHTCPPCPAPELLGGPSVFLFPPKPKDTLMISRTPEVTCVVVDVSHEDPEVKFNWYVDGVEVHNAKTKPCEEQYGSTYRCVSVLTVLHQDWLNGKEYKCKVSNKALPAPIEKTISKAKGQPREPQVYTLPPSREEMTKNQVSLTCLVKGFYPSDIAVEWESNGQPENNYKTTPPVLDSDGSFFLYSKLTVDKSRWQQGNVFSCSVMHEALHNHYTQKSLSLSPGKGGGGSGGGGSGGGGSGGGGSGGGGSGGGGSDKTHTCPPCPAPELLGGPSVFLFPPKPKDTLMISRTPEVTCVVVDVSHEDPEVKFNWYVDGVEVHNAKTKPCEEQYGSTYRCVSVLTVLHQDWLNGKEYKCKVSNKALPAPIEKTISKAKGQPREPQVYTLPPSREEMTKNQVSLTCLVKGFYPSDIAVEWESNGQPENNYKTTPPVLDSDGSFFLYSKLTVDKSRWQQGNVFSCSVMHEALHNHYTQKSLSLSPGK

SEQ ID NO: 352 - protein, 985 aa, Artificial Sequence
  Description of Artificial Sequence: Synthetic polypeptide
QVQLVESGGGVVQPGRSLRLSCAASGFTFSNHGMHWVRQAPGKCLEWVAGIWSEGSNKYYADAVKGRFTISRDNSKNTLYLQMNSLRAEDTAVYYCARATYTTGWSYFDYWGQGTLVTVSSGGGGSGGGGSGGGGSSYELTQPPSVSVSPGQTASITCSGDKLGDKYASWYQQKSGQSPVLVIYQDAKRPSGIPERFSGSNSGNTATLTISGTQAMDEADYYCQAFHQSTWVFGCGTQLTVLSGGGGSEVQLVESGGGLVQPGGSLKLSCAASGFTFNKYAMNWVRQAPGKGLEWVARIRSKYNNYATYYADSVKDRFTISRDDSKNTAYLQMNNLKTEDTAVYYCVRHGNFGNSYISYWAYWGQGTLVTVSSGGGGSGGGGSGGGGSQTVVTQEPSLTVSPGGTVTLTCGSSTGAVTSGNYPNWVQQKPGQAPRGLIGGTKFLAPGTPARFSGSLLGGKAALTLSGVQPEDEAEYYCVLWYSNRWVFGGGTKLTVLGGGGDKTHTCPPCPAPELLGGPSVFLFPPKPKDTLMISRTPEVTCVVVDVSHEDPEVKFNWYVDGVEVHNAKTKPCEEQYGSTYRCVSVLTVLHQDWLNGKEYKCKVSNKALPAPIEKTISKAKGQPREPQVYTLPPSREEMTKNQVSLTCLVKGFYPSDIAVEWESNGQPENNYKTTPPVLDSDGSFFLYSKLTVDKSRWQQGNVFSCSVMHEALHNHYTQKSLSLSPGKGGGGSGGGGSGGGGSGGGGSGGGGSGGGGSDKTHTCPPCPAPELLGGPSVFLFPPKPKDTLMISRTPEVTCVVVDVSHEDPEVKFNWYVDGVEVHNAKTKPCEEQYGSTYRCVSVLTVLHQDWLNGKEYKCKVSNKALPAPIEKTISKAKGQPREPQVYTLPPSREEMTKNQVSLTCLVKGFYPSDIAVEWESNGQPENNYKTTPPVLDSDGSFFLYSKLTVDKSRWQQGNVFSCSVMHEALHNHYTQKSLSLSPGK

SEQ ID NO: 353 - protein, 738 aa, Artificial Sequence
  Description of Artificial Sequence: Synthetic polypeptide
QVQLVQSGAEVKKPGSSVKVSCKASGYTFTSYWLNWVRQAPGQGLEWMGMIHPSDSESRLNQKFKDRVTITADKSTSTAYMELSSLRSEDTAVYYCARQGIITSVQEFAYWGQGTLVTVSSGGGGSGGGGSGGGGSGGGGSIQMTQSPSSLSASVGDRVTITCSASSSVNYIFWYQQKPGKAPKLLIYRTSNLASGVPSRFSGSGSGTDFTLTISSLQPEDFATYYCQQYHSYPLTFGGGTKVEIKSGGGGSEVQLVESGGGLVQPGGSLRLSCAASGFTFSTYAMNWVRQAPGKGLEWVGRIRSKYNNYATYYADSVKGRFTISRDDSKNTLYLQMNSLRAEDTAVYYCVRHGNFGDSYVSWFEYWGQGTLVTVSSGKPGSGKPGSGKPGSGKPGSQAVVTQEPSLTVSPGGTVTLTCGSSTGAVTTSNYANWVQQKPGKSPRGLIGGTNKRAPGVPARFSGSLLGGKAALTISGAQPEDEADYYCALWYSNHWVFGGGTKLTVLEPKSSDKTHTCPPCPAPEFEGGPSVFLFPPKPKDTLMISRTPEVTCVVVDVSHEDPEVKFNWYVDGVEVHNAKTKPREEQYNSTYRVVSVLTVLHQDWLNGKEYKCKVSNKALPASIEKTISKAKGQPREPQVYTLPPCRKKLTKNQVSLTCLVKGFYPSDIAVEWESNGQPENNYKTTPPVLKSDGSFFLYSKLTVDKSRWQQGNVFSCSVMHEALHNHYTQKSLSLSPGK

SEQ ID NO: 354 - protein, 737 aa, Artificial Sequence
  Description of Artificial Sequence: Synthetic polypeptide
QVQLVQSGAEVKKPGSSVKVSCKASGYTFTSYWLNWVRQAPGQGLEWMGMIHPSDSESRLNQKFKDRVTITADKSTSTAYMELSSLRSEDTAVYYCARQGIITSVQEFAYWGQGTLVTVSSGGGGSGGGGSGGGGSGGGGSIQMTQSPSSLSASVGDRVTITCSASSSVNYIFWYQQKPGKAPKLLIYRTSNLASGVPSRFSGSGSGTDFTLTISSLQPEDFATYYCQQYHSYPLTFGGGTKVEIKSGGGSEVQLVESGGGLVQPGGSLRLSCAASGFTFSTYAMNWVRQAPGKGLEWVGRIRSKYNNYATYYADSVKGRFTISRDDSKNTLYLQMNSLRAEDTAVYYCVRHGNFGDSYVSWFEYWGQGTLVTVSSGKPGSGKPGSGKPGSGKPGSQAVVTQEPSLTVSPGGTVTLTCGSSTGAVTTSNYANWVQQKPGKSPRGLIGGTNKRAPGVPARFSGSLLGGKAALTISGAQPEDEADYYCALWYSNHWVFGGGTKLTVLEPKSSDKTHTCPPCPAPEFEGGPSVFLFPPKPKDTLMISRTPEVTCVVVDVSHEDPEVKFNWYVDGVEVHNAKTKPREEQYNSTYRVVSVLTVLHQDWLNGKEYKCKVSNKALPASIEKTISKAKGQPREPQVYTLPPCRKKLTKNQVSLTCLVKGFYPSDIAVEWESNGQPENNYKTTPPVLKSDGSFFLYSKLTVDKSRWQQGNVFSCSVMHEALHNHYTQKSLSLSPGK

SEQ ID NO: 355 - protein, 738 aa, Artificial Sequence
  Description of Artificial Sequence: Synthetic polypeptide
QVQLVQSGAEVKKPGSSVKVSCKASGYTFTSYWLNWVRQAPGQGLEWMGMIHPSDSESRLNQKFKDRVTITADKSTSTAYMELSSLRSEDTAVYYCARQGIITSVQEFAYWGQGTLVTVSSGGGGSGGGGSGGGGSGGGGSIQMTQSPSSLSASVGDRVTITCSASSSVNYIYWYQQKPGKAPKLLIYRTSNLASGVPSRFSGSGSGTDFTLTISSLQPEDFATYYCQQYHSYPLTFGGGTKVEIKSGGGGSEVQLVESGGGLVQPGGSLRLSCAASGFTFSTYAMNWVRQAPGKGLEWVGRIRSKYNNYATYYADSVKGRFTISRDDSKNTLYLQMNSLRAEDTAVYYCVRHGNFGDSYVSWFEYWGQGTLVTVSSGKPGSGKPGSGKPGSGKPGSQAVVTQEPSLTVSPGGTVTLTCGSSTGAVTTSNYANWVQQKPGKSPRGLIGGTNKRAPGVPARFSGSLLGGKAALTISGAQPEDEADYYCALWYSNHWVFGGGTKLTVLEPKSSDKTHTCPPCPAPEFEGGPSVFLFPPKPKDTLMISRTPEVTCVVVDVSHEDPEVKFNWYVDGVEVHNAKTKPREEQYNSTYRVVSVLTVLHQDWLNGKEYKCKVSNKALPASIEKTISKAKGQPREPQVYTLPPCRKKLTKNQVSLTCLVKGFYPSDIAVEWESNGQPENNYKTTPPVLKSDGSFFLYSKLTVDKSRWQQGNVFSCSVMHEALHNHYTQKSLSLSPGK

SEQ ID NO: 356 - protein, 738 aa, Artificial Sequence
  Description of Artificial Sequence: Synthetic polypeptide
QVQLVQSGAEVKKPGSSVKVSCKASGYTFTSYWLNWVRQAPGQGLEWMGMIHPSDSETRLNQKFKDRVTITADKSTSTAYMELSSLRSEDTAVYYCARQGIITSVQEFAYWGQGTLVTVSSGGGGSGGGGSGGGGSGGGGSIQMTQSPSSLSASVGDRVTITCSASSSVNYIFWYQQKPGKAPKLLIYRTSNLASGVPSRFSGSGSGTDFTLTISSLQPEDFATYYCQQYHSYPLTFGGGTKVEIKSGGGGSEVQLVESGGGLVQPGGSLRLSCAASGFTFSTYAMNWVRQAPGKGLEWVGRIRSKYNNYATYYADSVKGRFTISRDDSKNTLYLQMNSLRAEDTAVYYCVRHGNFGDSYVSWFEYWGQGTLVTVSSGKPGSGKPGSGKPGSGKPGSQAVVTQEPSLTVSPGGTVTLTCGSSTGAVTTSNYANWVQQKPGKSPRGLIGGTNKRAPGVPARFSGSLLGGKAALTISGAQPEDEADYYCALWYSNHWVFGGGTKLTVLEPKSSDKTHTCPPCPAPEFEGGPSVFLFPPKPKDTLMISRTPEVTCVVVDVSHEDPEVKFNWYVDGVEVHNAKTKPREEQYNSTYRVVSVLTVLHQDWLNGKEYKCKVSNKALPASIEKTISKAKGQPREPQVYTLPPCRKKLTKNQVSLTCLVKGFYPSDIAVEWESNGQPENNYKTTPPVLKSDGSFFLYSKLTVDKSRWQQGNVFSCSVMHEALHNHYTQKSLSLSPGK

SEQ ID NO: 357 - protein, 738 aa, Artificial Sequence
  Description of Artificial Sequence: Synthetic polypeptide
QVQLVQSGAEVKKPGSSVKVSCKASGYTFTSYWLNWVRQAPGQGLEWMGMIHPSDSETRLNQKFKDRVTITADKSTSTAYMELSSLRSEDTAVYYCARQGIITSVQEFAYWGQGTLVTVSSGGGGSGGGGSGGGGSGGGGSIQMTQSPSSLSASVGDRVTITCSASSSVNYIYWYQQKPGKAPKLLIYRTSNLASGVPSRFSGSGSGTDFTLTISSLQPEDFATYYCQQYHSYPLTFGGGTKVEIKSGGGGSEVQLVESGGGLVQPGGSLRLSCAASGFTFSTYAMNWVRQAPGKGLEWVGRIRSKYNNYATYYADSVKGRFTISRDDSKNTLYLQMNSLRAEDTAVYYCVRHGNFGDSYVSWFEYWGQGTLVTVSSGKPGSGKPGSGKPGSGKPGSQAVVTQEPSLTVSPGGTVTLTCGSSTGAVTTSNYANWVQQKPGKSPRGLIGGTNKRAPGVPARFSGSLLGGKAALTISGAQPEDEADYYCALWYSNHWVFGGGTKLTVLEPKSSDKTHTCPPCPAPEFEGGPSVFLFPPKPKDTLMISRTPEVTCVVVDVSHEDPEVKFNWYVDGVEVHNAKTKPREEQYNSTYRVVSVLTVLHQDWLNGKEYKCKVSNKALPASIEKTISKAKGQPREPQVYTLPPCRKKLTKNQVSLTCLVKGFYPSDIAVEWESNGQPENNYKTTPPVLKSDGSFFLYSKLTVDKSRWQQGNVFSCSVMHEALHNHYTQKSLSLSPGK

SEQ ID NO: 358 - protein, 737 aa, Artificial Sequence
  Description of Artificial Sequence: Synthetic polypeptide
QVQLVQSGAEVKKPGSSVKVSCKASGYTFTSYWMNWVRQAPGQGLEWMGMIHPSDSESRLNQKFKDRVTITADKSTSTAYMELSSLRSEDTAVYYCARQGIITSVQEFAYWGQGTLVTVSSGGGGSGGGGSGGGGSGGGGSIQMTQSPSSLSASVGDRVTITCSASSSVNYIFWYQQKPGKAPKLLIYRTSNLASGVPSRFSGSGSGTDFTLTISSLQPEDFATYYCQQYHSYPLTFGGGTKVEIKSGGGGSEVQLVESGGGLVQPGGSLRLSCAASGFTFSTYAMNWVRQAPGKGLEWVGRIRSKYNNYATYYADSVKGRFTISRDDSKNTLYLQMNSLRAEDTAVYYCVRHGNFGDSYVSWFEYWGQGTLVTVSSGKPGSGKPGSGKPGSGKPGSQAVVTQEPSLTVSPGGTVTLTCGSSTGAVTTSNYANWVQQKPGKSPRGLIGGTNKRAPGVPARFSGSLLGGKAALTISGAQPEDEADYYCALWYSNHWVFGGGTKLTVLEPKSSDKTHTCPPCPAPEFEGGPSVFLFPPKPKDTLMISRTPEVTCVVVDVSHEDPEVKFNWYVDGVEVHNAKTKPREEQYNSTYRVVSVLTVLHQDWLNGKEYKCKVSNKALPASIEKTISKAKGQPREPQVYTLPPCRKKLTKNQVSLTCLVKGFYPSDIAVEWESNGQPENNYKTTPPVLKSDGSFFLYSKLTVDKSRWQQGNVFSCSVMHEALHNHYTQKSLSLSPG

SEQ ID NO: 359 - protein, 738 aa, Artificial Sequence
  Description of Artificial Sequence: Synthetic polypeptide
QVQLVQSGAEVKKPGSSVKVSCKASGYTFTSYWMNWVRQAPGQGLEWMGMIHPSDSESRLNQKFKDRVTITADKSTSTAYMELSSLRSEDTAVYYCARQGIITSVQEFAYWGQGTLVTVSSGGGGSGGGGSGGGGSGGGGSIQMTQSPSSLSASVGDRVTITCSASSSVNYIYWYQQKPGKAPKLLIYRTSNLASGVPSRFSGSGSGTDFTLTISSLQPEDFATYYCQQYHSYPLTFGGGTKVEIKSGGGGSEVQLVESGGGLVQPGGSLRLSCAASGFTFSTYAMNWVRQAPGKGLEWVGRIRSKYNNYATYYADSVKGRFTISRDDSKNTLYLQMNSLRAEDTAVYYCVRHGNFGDSYVSWFEYWGQGTLVTVSSGKPGSGKPGSGKPGSGKPGSQAVVTQEPSLTVSPGGTVTLTCGSSTGAVTTSNYANWVQQKPGKSPRGLIGGTNKRAPGVPARFSGSLLGGKAALTISGAQPEDEADYYCALWYSNHWVFGGGTKLTVLEPKSSDKTHTCPPCPAPEFEGGPSVFLFPPKPKDTLMISRTPEVTCVVVDVSHEDPEVKFNWYVDGVEVHNAKTKPREEQYNSTYRVVSVLTVLHQDWLNGKEYKCKVSNKALPASIEKTISKAKGQPREPQVYTLPPCRKKLTKNQVSLTCLVKGFYPSDIAVEWESNGQPENNYKTTPPVLKSDGSFFLYSKLTVDKSRWQQGNVFSCSVMHEALHNHYTQKSLSLSPGK

SEQ ID NO: 360 - protein, 738 aa, Artificial Sequence
  Description of Artificial Sequence: Synthetic polypeptide
QVQLVQSGAEVKKPGSSVKVSCKASGYTFTSYWMNWVRQAPGQGLEWMGMIHPSDSETRLNQKFKDRVTITADKSTSTAYMELSSLRSEDTAVYYCARQGIITSVQEFAYWGQGTLVTVSSGGGGSGGGGSGGGGSGGGGSIQMTQSPSSLSASVGDRVTITCSASSSVNYIFWYQQKPGKAPKLLIYRTSNLASGVPSRFSGSGSGTDFTLTISSLQPEDFATYYCQQYHSYPLTFGGGTKVEIKSGGGGSEVQLVESGGGLVQPGGSLRLSCAASGFTFSTYAMNWVRQAPGKGLEWVGRIRSKYNNYATYYADSVKGRFTISRDDSKNTLYLQMNSLRAEDTAVYYCVRHGNFGDSYVSWFEYWGQGTLVTVSSGKPGSGKPGSGKPGSGKPGSQAVVTQEPSLTVSPGGTVTLTCGSSTGAVTTSNYANWVQQKPGKSPRGLIGGTNKRAPGVPARFSGSLLGGKAALTISGAQPEDEADYYCALWYSNHWVFGGGTKLTVLEPKSSDKTHTCPPCPAPEFEGGPSVFLFPPKPKDTLMISRTPEVTCVVVDVSHEDPEVKFNWYVDGVEVHNAKTKPREEQYNSTYRVVSVLTVLHQDWLNGKEYKCKVSNKALPASIEKTISKAKGQPREPQVYTLPPCRKKLTKNQVSLTCLVKGFYPSDIAVEWESNGQPENNYKTTPPVLKSDGSFFLYSKLTVDKSRWQQGNVFSCSVMHEALHNHYTQKSLSLSPGK

SEQ ID NO: 361 - protein, 737 aa, Artificial Sequence
  Description of Artificial Sequence: Synthetic polypeptide
QVQLVQSGAEVKKPGSSVKVSCKASGYTFTSYWMNWVRQAPGQGLEWMGMIHPSDSETRLNQKFKDRVTITADKSTSTAYMELSSLRSEDTAVYYCARQGIITSVQEFAYWGQGTLVTVSSGGGGSGGGGSGGGGSGGGGSIQMTQSPSSLSASVGDRVTITCSASSSVNYIYWYQQKPGKAPKLLIYRTSNLASGVPSRFSGSGSGTDFTLTISSLQPEDFATYYCQQYHSYPLTFGGGTKVEIKSGGGGSEVQLVESGGGLVQPGGSLRLSCAASGFTFSTYAMNWVRQAPGKGLEWVGRIRSKYNNYATYYADSVKGRFTISRDDSKNTLYLQMNSLRAEDTAVYYCVRHGNFGDSYVSWFEYWGQGTLVTVSSGKPGSGKPGSGKPGSGKPGSQAVVTQEPSLTVSPGGTVTLTCGSSTGAVTTSNYANWVQQKPGKSPRGLIGGTNKRAPGVPARFSGSLLGGKAALTISGAQPEDEADYYCALWYSNHWVFGGGTKLTVLEPKSSDKTHTCPPCPAPEFEGGPSVFLFPPKPKDTLMISRTPEVTCVVVDVSHEDPEVKFNWYVDGVEVHNAKTKPREEQYNSTYRVVSVLTVLHQDWLNGKEYKCKVSNKALPASIEKTISKAKGQPREPQVYTLPPCRKKLTKNQVSLTCLVKGFYPSDIAVEWESNGQPENNYKTTPPVLKSDGSFFLYSKLTVDKSRWQQGNVFSCSVMHEALHNHYTQKSLSLSPG

SEQ ID NO: 362 - protein, 737 aa, Artificial Sequence
  Description of Artificial Sequence: Synthetic polypeptide
QVQLVQSGAEVKKPGSSVKVSCKASGYTFTSYWMNWVRQAPGQGLEWMGMIHPSDSETRLNQKFKDRVTITADKSTSTAYMELSSLRSEDTAVYYCARQGIITSVQEFAYWGQGTLVTVSSGGGGSGGGGSGGGGSGGGGSIQMTQSPSSLSASVGDRVTITCSASSSVNYIYWYQQKPGKAPKLLIYRTSNLASGVPSRFSGSGSGTDFTLTISSLQPEDFATYYCQQYHSYPLTFGGGTKVEIKSGGGSEVQLVESGGGLVQPGGSLRLSCAASGFTFSTYAMNWVRQAPGKGLEWVGRIRSKINNYATYYADSVKGRFTISRDDSKNTLYLQMNSLRAEDTAVYYCVRHGNFGDSYVSWFAYWGQGTLVTVSSGKPGSGKPGSGKPGSGKPGSQAVVTQEPSLTVSPGGTVTLTCGSSTGAVTTSNYANWVQQKPGKSPRGLIGGTNKRAPGVPARFSGSLLGGKAALTISGAQPEDEADYYCALWYSNHWVFGGGTKLTVLEPKSSDKTHTCPPCPAPEFEGGPSVFLFPPKPKDTLMISRTPEVTCVVVDVSHEDPEVKFNWYVDGVEVHNAKTKPREEQYNSTYRVVSVLTVLHQDWLNGKEYKCKVSNKALPASIEKTISKAKGQPREPQVYTLPPCRKKLTKNQVSLTCLVKGFYPSDIAVEWESNGQPENNYKTTPPVLKSDGSFFLYSKLTVDKSRWQQGNVFSCSVMHEALHNHYTQKSLSLSPGK

SEQ ID NO: 363 - protein, 737 aa, Artificial Sequence
  Description of Artificial Sequence: Synthetic polypeptide
QVQLVQSGAEVKKPGSSVKVSCKASGYTFTSYWMNWVRQAPGQGLEWMGMIHPSDSETRLNQKFKDRVTITADKSTSTAYMELSSLRSEDTAVYYCARQGIITSVQEFAYWGQGTLVTVSSGGGGSGGGGSGGGGSGGGGSIQMTQSPSSLSASVGDRVTITCSASSSVNYIYWYQQKPGKAPKLLIYRTSNLASGVPSRFSGSGSGTDFTLTISSLQPEDFATYYCQQYHSYPLTFGGGTKVEIKSGGGSEVQLVESGGGLVQPGGSLRLSCAASGFTFSTYAMNWVRQAPGKGLEWVGRIRSKYNNYATYYADSVKGRFTISRDDSKNTLYLQMNSLRAEDTAVYYCVRHGNFGDSYVSWFAYWGQGTLVTVSSGKPGSGKPGSGKPGSGKPGSQAVVTQEPSLTVSPGGTVTLTCGSSTGAVTTSNYANWVQQKPGKSPRGLIGGTNKRAPGVPARFSGSLLGGKAALTISGAQPEDEADYYCALWYSNHWVFGGGTKLTVLEPKSSDKTHTCPPCPAPEFEGGPSVFLFPPKPKDTLMISRTPEVTCVVVDVSHEDPEVKFNWYVDGVEVHNAKTKPREEQYNSTYRVVSVLTVLHQDWLNGKEYKCKVSNKALPASIEKTISKAKGQPREPQVYTLPPCRKKLTKNQVSLTCLVKGFYPSDIAVEWESNGQPENNYKTTPPVLKSDGSFFLYSKLTVDKSRWQQGNVFSCSVMHEALHNHYTQKSLSLSPGK

SEQ ID NO: 364 - protein, 737 aa, Artificial Sequence
  Description of Artificial Sequence: Synthetic polypeptide
QVQLVQSGAEVKKPGSSVKVSCKASGYTFTSYWMNWVRQAPGQGLEWMGMIHPSDSETRLNQKFKDRVTITADKSTSTAYMELSSLRSEDTAVYYCARQGIITSVQEFAYWGQGTLVTVSSGGGGSGGGGSGGGGSGGGGSIQMTQSPSSLSASVGDRVTITCSASSSVNYIYWYQQKPGKAPKLLIYRTSNLASGVPSRFSGSGSGTDFTLTISSLQPEDFATYYCQQYHSYPLTFGGGTKVEIKSGGGSEVQLVESGGGLVQPGGSLRLSCAASGFTFSTYAMNWVRQAPGKGLEWVGRIRSKYNNYATYYADSVKGRFTISRDDSKNTLYLQMNSLRAEDTAVYYCVRHGNFGDSYVSWFEYWGQGTLVTVSSGKPGSGKPGSGKPGSGKPGSQAVVTQEPSLTVSPGGTVTLTCGSSTGAVTTSNYANWVQQKPGKSPRGLIGGTNKRAPGVPARFSGSLLGGKAALTISGAQPEDEADYYCALWYSNHWVFGGGTKLTVLEPKSSDKTHTCPPCPAPEFEGGPSVFLFPPKPKDTLMISRTPEVTCVVVDVSHEDPEVKFNWYVDGVEVHNAKTKPREEQYNSTYRVVSVLTVLHQDWLNGKEYKCKVSNKALPASIEKTISKAKGQPREPQVYTLPPCRKKLTKNQVSLTCLVKGFYPSDIAVEWESNGQPENNYKTTPPVLKSDGSFFLYSKLTVDKSRWQQGNVFSCSVMHEALHNHYTQKSLSLSPGK

SEQ ID NO: 365 - protein, 737 aa, Artificial Sequence
  Description of Artificial Sequence: Synthetic polypeptide
QVQLVQSGAEVKKPGSSVKVSCKASGYTFTSYWMNWVRQAPGQGLEWMGMIHPSDSETRLNQKFKDRVTITADKSTSTAYMELSSLRSEDTAVYYCARQGIITSVQEFNYWGQGTLVTVSSGGGGSGGGGSGGGGSGGGGSIQMTQSPSSLSASVGDRVTITCSASSSVNYIYWYQQKPGKAPKLLIYRTSNLASGVPSRFSGSGSGTDFTLTISSLQPEDFATYYCQQYHSYPLTFGGGTKVEIKSGGGSEVQLVESGGGLVQPGGSLRLSCAASGFTFSTYAMNWVRQAPGKGLEWVGRIRSKYNNYATYYADSVKGRFTISRDDSKNTLYLQMNSLRAEDTAVYYCVRHGNFGDSYVSWFAYWGQGTLVTVSSGKPGSGKPGSGKPGSGKPGSQAVVTQEPSLTVSPGGTVTLTCGSSTGAVTTSNYANWVQQKPGKSPRGLIGGTNKRAPGVPARFSGSLLGGKAALTISGAQPEDEADYYCALWYSNHWVFGGGTKLTVLEPKSSDKTHTCPPCPAPEFEGGPSVFLFPPKPKDTLMISRTPEVTCVVVDVSHEDPEVKFNWYVDGVEVHNAKTKPREEQYNSTYRVVSVLTVLHQDWLNGKEYKCKVSNKALPASIEKTISKAKGQPREPQVYTLPPCRKKLTKNQVSLTCLVKGFYPSDIAVEWESNGQPENNYKTTPPVLKSDGSFFLYSKLTVDKSRWQQGNVFSCSVMHEALHNHYTQKSLSLSPGK

SEQ ID NO: 366 - protein, 474 aa, Artificial Sequence
  Description of Artificial Sequence: Synthetic polypeptide
EVQLVQSGAEVKKPGESLKISCKGSGYEFSSHWMNWVRQMPGKGLEWMGQIYPGDGDINYNEKFRGQVTISADKSISTAYLQWSSLKASDTAMYYCARHGNYVMDYWGQGTLVTVSSGKPGSGKPGSGKPGSGKPGSIQLTQSPSFLSASVGDRVTITCSASSSVSYMFWYQQKPGKAPKPWIYRTSNLASGVPSRFSGSGSGTEFTLTISSLQPEDFATYYCQQFHDYPRTFGGGTKVEIKEPKSSDKTHTCPPCPAPEFEGGPSVFLFPPKPKDTLMISRTPEVTCVVVDVSHEDPEVKFNWYVDGVEVHNAKTKPREEQYNSTYRVVSVLTVLHQDWLNGKEYKCKVSNKALPASIEKTISKAKGQPREPQVYTLPPCRKKLTKNQVSLTCLVKGFYPSDIAVEWESNGQPENNYKTTPPVLKSDGSFFLYSKLTVDKSRWQQGNVFSCSVMHEALHNHYTQKSLSLSPGK

SEQ ID NO: 367 - protein, 478 aa, Artificial Sequence
  Description of Artificial Sequence: Synthetic polypeptide
QVQLVQSGAEVKKPGSSVKVSCKASGYTFTSYWMNWVRQAPGQGLEWMGMIHPSDSETRLNQKFKDRVTITADKSTSTAYMELSSLRSEDTAVYYCARQGIITSVQEFAYWGQGTLVTVSSGKPGSGKPGSGKPGSGKPGSIQMTQSPSSLSASVGDRVTITCSASSSVNYIYWYQQKPGKAPKLLIYRTSNLASGVPSRFSGSGSGTDFTLTISSLQPEDFATYYCQQYHSYPLTFGGGTKVEIKEPKSSDKTHTCPPCPAPEFEGGPSVFLFPPKPKDTLMISRTPEVTCVVVDVSHEDPEVKFNWYVDGVEVHNAKTKPREEQYNSTYRVVSVLTVLHQDWLNGKEYKCKVSNKALPASIEKTISKAKGQPREPQVYTLPPCRKKLTKNQVSLTCLVKGFYPSDIAVEWESNGQPENNYKTTPPVLKSDGSFFLYSKLTVDKSRWQQGNVFSCSVMHEALHNHYTQKSLSLSPGK

SEQ ID NO: 368 - protein, 450 aa, Artificial Sequence
  Description of Artificial Sequence: Synthetic polypeptide
EVQLVESGGGLVQPGGSLRLSCAASGFTFSSFGMHWVRQAPGKGLEWVSYISSGSSTIYYADTVKGRFTISRDNAKNSLYLQMNSLRAEDTAVYYCARWGYYGSSYFAYWGQGTLVTVSSASTKGPSVFPLAPSSKSTSGGTAALGCLVKDYFPEPVTVSWNSGALTSGVHTFPAVLQSSGLYSLSSVVTVPSSSLGTQTYICNVNHKPSNTKVDKRVEPKSCDKTHTCPPCPAPEFEGGPSVFLFPPKPKDTLMISRTPEVTCVVVDVSHEDPEVKFNWYVDGVEVHNAKTKPREEQYNSTYRVVSVLTVLHQDWLNGKEYKCKVSNKALPASIEKTISKAKGQPREPQVCTLPPSRDELTKNQVSLTCLVEGFYPSDIAVEWESNGQPENNYKTTPPVLDSDGSFFLYSDLTVDKSRWQQGNVFSCSVMHEALHNHYTQESLSLSPGK

SEQ ID NO: 369 - protein, 447 aa, Artificial Sequence
  Description of Artificial Sequence: Synthetic polypeptide
EVQLVQSGAEVKKPGESLKISCKGSGYEFSSHWMNWVRQMPGKGLEWMGQIYPGDGDINYNEKFRGQVTISADKSISTAYLQWSSLKASDTAMYYCARHGNYVMDYWGQGTLVTVSSASTKGPSVFPLAPSSKSTSGGTAALGCLVKDYFPEPVTVSWNSGALTSGVHTFPAVLQSSGLYSLSSVVTVPSSSLGTQTYICNVNHKPSNTKVDKRVEPKSCDKTHTCPPCPAPEFEGGPSVFLFPPKPKDTLMISRTPEVTCVVVDVSHEDPEVKFNWYVDGVEVHNAKTKPREEQYNSTYRVVSVLTVLHQDWLNGKEYKCKVSNKALPASIEKTISKAKGQPREPQVCTLPPSRDELTKNQVSLTCLVEGFYPSDIAVEWESNGQPENNYKTTPPVLDSDGSFFLYSDLTVDKSRWQQGNVFSCSVMHEALHNHYTQESLSLSPGK

SEQ ID NO: 370 - protein, 447 aa, Artificial Sequence
  Description of Artificial Sequence: Synthetic polypeptide
QVQLVQSGAEVKKPGASVKVSCKASGYEFSSHWMNWVRQAPGQGLEWMGQIYPGDGDINYNEKFRGRVTMTRDTSTSTVYMELSSLRSEDTAVYYCARHGNYVMDYWGQGTLVTVSSASTKGPSVFPLAPSSKSTSGGTAALGCLVKDYFPEPVTVSWNSGALTSGVHTFPAVLQSSGLYSLSSVVTVPSSSLGTQTYICNVNHKPSNTKVDKRVEPKSCDKTHTCPPCPAPEFEGGPSVFLFPPKPKDTLMISRTPEVTCVVVDVSHEDPEVKFNWYVDGVEVHNAKTKPREEQYNSTYRVVSVLTVLHQDWLNGKEYKCKVSNKALPASIEKTISKAKGQPREPQVCTLPPSRDELTKNQVSLTCLVEGFYPSDIAVEWESNGQPENNYKTTPPVLDSDGSFFLYSDLTVDKSRWQQGNVFSCSVMHEALHNHYTQESLSLSPGK

SEQ ID NO: 371 - protein, 451 aa, Artificial Sequence
  Description of Artificial Sequence: Synthetic polypeptide
QVQLVQSGAEVKKPGASVKVSCKASGYTFTSYWMNWVRQAPGQGLEWIGMIHPSDSETRLNQKFKDRVTLTVDKSSSTAYMELSSLRSEDTAVYYCARQGIITSVQEFAYWGQGTLVTVSSASTKGPSVFPLAPSSKSTSGGTAALGCLVKDYFPEPVTVSWNSGALTSGVHTFPAVLQSSGLYSLSSVVTVPSSSLGTQTYICNVNHKPSNTKVDKRVEPKSCDKTHTCPPCPAPEFEGGPSVFLFPPKPKDTLMISRTPEVTCVVVDVSHEDPEVKFNWYVDGVEVHNAKTKPREEQYNSTYRVVSVLTVLHQDWLNGKEYKCKVSNKALPASIEKTISKAKGQPREPQVCTLPPSRDELTKNQVSLTCLVEGFYPSDIAVEWESNGQPENNYKTTPPVLDSDGSFFLYSDLTVDKSRWQQGNVFSCSVMHEALHNHYTQESLSLSPGK

SEQ ID NO: 372 - protein, 451 aa, Artificial Sequence
  Description of Artificial Sequence: Synthetic polypeptide
QVQLVQSGAEVKKPGASVKVSCKASGYTFTSYWMNWVRQAPGQGLEWMGMIHPSDSETRLNQEFKDRVTMTRDTSTSTVYMELSSLRSEDTAVYYCARQGVITSVQEFAYWGQGTLVTVSSASTKGPSVFPLAPSSKSTSGGTAALGCLVKDYFPEPVTVSWNSGALTSGVHTFPAVLQSSGLYSLSSVVTVPSSSLGTQTYICNVNHKPSNTKVDKRVEPKSCDKTHTCPPCPAPEFEGGPSVFLFPPKPKDTLMISRTPEVTCVVVDVSHEDPEVKFNWYVDGVEVHNAKTKPREEQYNSTYRVVSVLTVLHQDWLNGKEYKCKVSNKALPASIEKTISKAKGQPREPQVCTLPPSRDELTKNQVSLTCLVEGFYPSDIAVEWESNGQPENNYKTTPPVLDSDGSFFLYSDLTVDKSRWQQGNVFSCSVMHEALHNHYTQESLSLSPGK

SEQ ID NO: 373 - protein, 451 aa, Artificial Sequence
  Description of Artificial Sequence: Synthetic polypeptide
QVQLVQSGAEVKKPGASVKVSCKASGYTFTSYWMNWVRQAPGQGLEWMGMIHPSDSETRLNQKFKDRVTLTRDKSISTAYMELSRLRSDDTAVYYCARQGIITSVQEFAYWGQGTLVTVSSASTKGPSVFPLAPSSKSTSGGTAALGCLVKDYFPEPVTVSWNSGALTSGVHTFPAVLQSSGLYSLSSVVTVPSSSLGTQTYICNVNHKPSNTKVDKRVEPKSCDKTHTCPPCPAPEFEGGPSVFLFPPKPKDTLMISRTPEVTCVVVDVSHEDPEVKFNWYVDGVEVHNAKTKPREEQYNSTYRVVSVLTVLHQDWLNGKEYKCKVSNKALPASIEKTISKAKGQPREPQVCTLPPSRDELTKNQVSLTCLVEGFYPSDIAVEWESNGQPENNYKTTPPVLDSDGSFFLYSDLTVDKSRWQQGNVFSCSVMHEALHNHYTQESLSLSPGK

SEQ ID NO: 374 - protein, 451 aa, Artificial Sequence
  Description of Artificial Sequence: Synthetic polypeptide
QVQLVQSGAEVKKPGASVKVSCKASGYTFTSYWMNWVRQAPGQGLEWMGMIHPSDSETRLNQKFKDRVTLTVDKSISTAYMELSRLRSDDTAVYYCARQGIITSVQEFAYWGQGTLVTVSSASTKGPSVFPLAPSSKSTSGGTAALGCLVKDYFPEPVTVSWNSGALTSGVHTFPAVLQSSGLYSLSSVVTVPSSSLGTQTYICNVNHKPSNTKVDKRVEPKSCDKTHTCPPCPAPEFEGGPSVFLFPPKPKDTLMISRTPEVTCVVVDVSHEDPEVKFNWYVDGVEVHNAKTKPREEQYNSTYRVVSVLTVLHQDWLNGKEYKCKVSNKALPASIEKTISKAKGQPREPQVCTLPPSRDELTKNQVSLTCLVEGFYPSDIAVEWESNGQPENNYKTTPPVLDSDGSFFLYSDLTVDKSRWQQGNVFSCSVMHEALHNHYTQESLSLSPGK

SEQ ID NO: 375 - protein, 451 aa, Artificial Sequence
  Description of Artificial Sequence: Synthetic polypeptide
QVQLVQSGAEVKKPGASVKVSCKASGYTFTSYWMNWVRQAPGQGLEWMGMIHPSDSETRLNQKFKDRVTLTVDTSISTAYMELSRLRSDDTAVYYCARQGIITSVQEFAYWGQGTLVTVSSASTKGPSVFPLAPSSKSTSGGTAALGCLVKDYFPEPVTVSWNSGALTSGVHTFPAVLQSSGLYSLSSVVTVPSSSLGTQTYICNVNHKPSNTKVDKRVEPKSCDKTHTCPPCPAPEFEGGPSVFLFPPKPKDTLMISRTPEVTCVVVDVSHEDPEVKFNWYVDGVEVHNAKTKPREEQYNSTYRVVSVLTVLHQDWLNGKEYKCKVSNKALPASIEKTISKAKGQPREPQVCTLPPSRDELTKNQVSLTCLVEGFYPSDIAVEWESNGQPENNYKTTPPVLDSDGSFFLYSDLTVDKSRWQQGNVFSCSVMHEALHNHYTQESLSLSPGK

SEQ ID NO: 376 - protein, 451 aa, Artificial Sequence
  Description of Artificial Sequence: Synthetic polypeptide
QVQLVQSGAEVKKPGASVKVSCKASGYTFTSYWMNWVRQAPGQGLEWMGMIHPSDSETRLNQKFKDRVTMTRDTSISTAYMELSRLRSDDTAVYYCARQGIITSVQEFAYWGQGTLVTVSSASTKGPSVFPLAPSSKSTSGGTAALGCLVKDYFPEPVTVSWNSGALTSGVHTFPAVLQSSGLYSLSSVVTVPSSSLGTQTYICNVNHKPSNTKVDKRVEPKSCDKTHTCPPCPAPEFEGGPSVFLFPPKPKDTLMISRTPEVTCVVVDVSHEDPEVKFNWYVDGVEVHNAKTKPREEQYNSTYRVVSVLTVLHQDWLNGKEYKCKVSNKALPASIEKTISKAKGQPREPQVCTLPPSRDELTKNQVSLTCLVEGFYPSDIAVEWESNGQPENNYKTTPPVLDSDGSFFLYSDLTVDKSRWQQGNVFSCSVMHEALHNHYTQESLSLSPGK

SEQ ID NO: 377 - protein, 451 aa, Artificial Sequence
  Description of Artificial Sequence: Synthetic polypeptide
QVQLVQSGAEVKKPGASVKVSCKASGYTFTSYWMNWVRQAPGQGLEWMGMIHPSDSETRLNQKFKDRVTMTRDTSTSTVYMELSSLRSEDTAVYYCARQGIITSVQEFAYWGQGTLVTVSSASTKGPSVFPLAPSSKSTSGGTAALGCLVKDYFPEPVTVSWNSGALTSGVHTFPAVLQSSGLYSLSSVVTVPSSSLGTQTYICNVNHKPSNTKVDKRVEPKSCDKTHTCPPCPAPEFEGGPSVFLFPPKPKDTLMISRTPEVTCVVVDVSHEDPEVKFNWYVDGVEVHNAKTKPREEQYNSTYRVVSVLTVLHQDWLNGKEYKCKVSNKALPASIEKTISKAKGQPREPQVCTLPPSRDELTKNQVSLTCLVEGFYPSDIAVEWESNGQPENNYKTTPPVLDSDGSFFLYSDLTVDKSRWQQGNVFSCSVMHEALHNHYTQESLSLSPGK

SEQ ID NO: 378 - protein, 451 aa, Artificial Sequence
  Description of Artificial Sequence: Synthetic polypeptide
QVQLVQSGAEVKKPGASVKVSCKASGYTFTSYWMNWVRQAPGQGLEWMGMIHPSDSETRLNQKFKDRVTMTVDKSISTAYMELSRLRSDDTAVYYCARQGIITSVQEFAYWGQGTLVTVSSASTKGPSVFPLAPSSKSTSGGTAALGCLVKDYFPEPVTVSWNSGALTSGVHTFPAVLQSSGLYSLSSVVTVPSSSLGTQTYICNVNHKPSNTKVDKRVEPKSCDKTHTCPPCPAPEFEGGPSVFLFPPKPKDTLMISRTPEVTCVVVDVSHEDPEVKFNWYVDGVEVHNAKTKPREEQYNSTYRVVSVLTVLHQDWLNGKEYKCKVSNKALPASIEKTISKAKGQPREPQVCTLPPSRDELTKNQVSLTCLVEGFYPSDIAVEWESNGQPENNYKTTPPVLDSDGSFFLYSDLTVDKSRWQQGNVFSCSVMHEALHNHYTQESLSLSPGK

SEQ ID NO: 379 - protein, 447 aa, Artificial Sequence
  Description of Artificial Sequence: Synthetic polypeptide
QVQLVQSGAEVKKPGSSVKVSCKASGYEFSSHWMNWVRQAPGQGLEWMGQIYPGDGDINYNEKFRGRVTITADKSTSTAYMELSSLRSEDTAVYYCARHGNYVMDYWGQGTTVTVSSASTKGPSVFPLAPSSKSTSGGTAALGCLVKDYFPEPVTVSWNSGALTSGVHTFPAVLQSSGLYSLSSVVTVPSSSLGTQTYICNVNHKPSNTKVDKRVEPKSCDKTHTCPPCPAPEFEGGPSVFLFPPKPKDTLMISRTPEVTCVVVDVSHEDPEVKFNWYVDGVEVHNAKTKPREEQYNSTYRVVSVLTVLHQDWLNGKEYKCKVSNKALPASIEKTISKAKGQPREPQVCTLPPSRDELTKNQVSLTCLVEGFYPSDIAVEWESNGQPENNYKTTPPVLDSDGSFFLYSDLTVDKSRWQQGNVFSCSVMHEALHNHYTQESLSLSPGK

SEQ ID NO: 380 - protein, 451 aa, Artificial Sequence
  Description of Artificial Sequence: Synthetic polypeptide
QVQLVQSGAEVKKPGSSVKVSCKASGYTFTSYWMNWVRQAPGQGLEWMGMIHPSDSETRLNQKFKDRVTITADKSTSTAYMELSSLRSEDTAVYYCARQGIITSVQEFAYWGQGTLVTVSSASTKGPSVFPLAPSSKSTSGGTAALGCLVKDYFPEPVTVSWNSGALTSGVHTFPAVLQSSGLYSLSSVVTVPSSSLGTQTYICNVNHKPSNTKVDKRVEPKSCDKTHTCPPCPAPEFEGGPSVFLFPPKPKDTLMISRTPEVTCVVVDVSHEDPEVKFNWYVDGVEVHNAKTKPREEQYNSTYRVVSVLTVLHQDWLNGKEYKCKVSNKALPASIEKTISKAKGQPREPQVCTLPPSRDELTKNQVSLTCLVEGFYPSDIAVEWESNGQPENNYKTTPPVLDSDGSFFLYSDLTVDKSRWQQGNVFSCSVMHEALHNHYTQESLSLSPGK

SEQ ID NO: 381 - protein, 214 aa, Artificial Sequence
  Description of Artificial Sequence: Synthetic polypeptide
DIQMTQSPSSLSASVGDRVTITCKASEDIYNRLAWYQQKPGKAPKLLIYGATNLETGVPSRFSGSGSGKDYTLTISSLQPEDIATYYCQQFWRTPPTFGGGTKVEIKRTVAAPSVFIFPPSDEQLKSGTASVVCLLNNFYPREAKVQWKVDNALQSGNSQESVTEQDSKDSTYSLSSTLTLSKADYEKHKVYACEVTHQGLSSPVTKSFNRGEC

SEQ ID NO: 382 - protein, 214 aa, Artificial Sequence
  Description of Artificial Sequence: Synthetic polypeptide
DIQMTQSPSSLSASVGDRVTITCKASEDIYNRLAWYQQKPGKAPKLLIYGATNLETGVPSRFSGSGSGTDFTFTISSLQPEDIATYYCQQFWRTPPTFGGGTKVEIKRTVAAPSVFIFPPSDEQLKSGTASVVCLLNNFYPREAKVQWKVDNALQSGNSQESVTEQDSKDSTYSLSSTLTLSKADYEKHKVYACEVTHQGLSSPVTKSFNRGEC

SEQ ID NO: 383 - protein, 214 aa, Artificial Sequence
  Description of Artificial Sequence: Synthetic polypeptide
DIQMTQSPSSLSASVGDRVTITCKASEDIYNRLAWYQQKPGKAPKPLISGATNLETGVPSRFSGSGSGKDYTLTISSLQPEDIATYYCQQFWRTPPTFGGGTKVEIKRTVAAPSVFIFPPSDEQLKSGTASVVCLLNNFYPREAKVQWKVDNALQSGNSQESVTEQDSKDSTYSLSSTLTLSKADYEKHKVYACEVTHQGLSSPVTKSFNRGEC

SEQ ID NO: 384 - protein, 214 aa, Artificial Sequence
  Description of Artificial Sequence: Synthetic polypeptide
DIQMTQSPSSLSASVGDRVTITCKASEDIYNRLAWYQQKPGKAPKPLISGATNLETGVPSRFSGSGSGTDFTFTISSLQPEDIATYYCQQFWRTPPTFGGGTKVEIKRTVAAPSVFIFPPSDEQLKSGTASVVCLLNNFYPREAKVQWKVDNALQSGNSQESVTEQDSKDSTYSLSSTLTLSKADYEKHKVYACEVTHQGLSSPVTKSFNRGEC

SEQ ID NO: 385 - protein, 214 aa, Artificial Sequence
  Description of Artificial Sequence: Synthetic polypeptide
DIQMTQSPSSLSASVGDRVTITCKASEDIYNRLAWYQQKPGKAPKPLIYGATNLETGVPSRFSGSGSGTDFTFTISSLQPEDIATYYCQQFWRTPPTFGGGTKVEIKRTVAAPSVFIFPPSDEQLKSGTASVVCLLNNFYPREAKVQWKVDNALQSGNSQESVTEQDSKDSTYSLSSTLTLSKADYEKHKVYACEVTHQGLSSPVTKSFNRGEC

SEQ ID NO: 386 - protein, 213 aa, Artificial Sequence
  Description of Artificial Sequence: Synthetic polypeptide
EIVLTQSPATLSLSPGERATLSCSASSSVNYIYWYQQKPGQAPRLLIYRTSNLASGIPARFSGSGSGTDFTLTISSLEPEDFAVYYCQQYHSYPLTFGGGTKVEIKRTVAAPSVFIFPPSDEQLKSGTASVVCLLNNFYPREAKVQWKVDNALQSGNSQESVTEQDSKDSTYSLSSTLTLSKADYEKHKVYACEVTHQGLSSPVTKSFNRGEC

SEQ ID NO: 387 - protein, 213 aa, Artificial Sequence
  Description of Artificial Sequence: Synthetic polypeptide
EIVLTQSPATLSLSPGERATLSCSASSSVSYMFWYQQKPGQAPRLLIYRTSNLASGIPARFSGSGSGTDFTLTISSLEPEDFAVYYCQQFHDYPRTFGGGTKVEIKRTVAAPSVFIFPPSDEQLKSGTASVVCLLNNFYPREAKVQWKVDNALQSGNSQESVTEQDSKDSTYSLSSTLTLSKADYEKHKVYACEVTHQGLSSPVTKSFNRGEC

SEQ ID NO: 388 - protein, 213 aa, Artificial Sequence
  Description of Artificial Sequence: Synthetic polypeptide
EIVLTQSPATLSLSPGERATLSCSASSSVSYMFWYQQKPGQAPRPWIYRTSNLASGIPPRFSGSGSGTDYTLTISSLEPEDFAVYYCQQFHDYPRTFGGGTKVEIKRTVAAPSVFIFPPSDEQLKSGTASVVCLLNNFYPREAKVQWKVDNALQSGNSQESVTEQDSKDSTYSLSSTLTLSKADYEKHKVYACEVTHQGLSSPVTKSFNRGEC

SEQ ID NO: 389 - protein, 213 aa, Artificial Sequence
  Description of Artificial Sequence: Synthetic polypeptide
EIVLTQSPATLSVSPGERATLSCSASSSVNYIYWYQQKPGQAPRPWIYRTSNLASGIPARFSGSGSGTEYTLTISSLQSEDFAVYYCQQYHSYPLTFGGGTKVEIKRTVAAPSVFIFPPSDEQLKSGTASVVCLLNNFYPREAKVQWKVDNALQSGNSQESVTEQDSKDSTYSLSSTLTLSKADYEKHKVYACEVTHQGLSSPVTKSFNRGEC

SEQ ID NO: 390 - protein, 213 aa, Artificial Sequence
  Description of Artificial Sequence: Synthetic polypeptide
EIVMTQSPATLSVSPGERATLSCSASSSVNYIYWYQQKPGQAPRLLIYRTSNLASGIPARFSGSGSGTEFTLTISSLQSEDFAVYYCQQYHSYPLTFGGGTKVEIKRTVAAPSVFIFPPSDEQLKSGTASVVCLLNNFYPREAKVQWKVDNALQSGNSQESVTEQDSKDSTYSLSSTLTLSKADYEKHKVYACEVTHQGLSSPVTKSFNRGEC

SEQ ID NO: 391 - protein, 213 aa, Artificial Sequence
  Description of Artificial Sequence: Synthetic polypeptide
EIVMTQSPATLSVSPGERATLSCSASSSVSYMFWYQQKPGQAPRLLIYRTSNLASGIPARFSGSGSGTEFTLTISSLQSEDFAVYYCQQFHDYPRTFGGGTKVEIKRTVAAPSVFIFPPSDEQLKSGTASVVCLLNNFYPREAKVQWKVDNALQSGNSQESVTEQDSKDSTYSLSSTLTLSKADYEKHKVYACEVTHQGLSSPVTKSFNRGEC

SEQ ID NO: 392 - protein, 212 aa, Artificial Sequence
  Description of Artificial Sequence: Synthetic polypeptide
IQLTQSPSFLSASVGDRVTITCSASSSVSYMFWYQQKPGKAPKLLIYRTSNLASGVPPRFSGSGSGTEFTLTISSLQPEDFATYYCQQFHDYPRTFGGGTKVEIKRTVAAPSVFIFPPSDEQLKSGTASVVCLLNNFYPREAKVQWKVDNALQSGNSQESVTEQDSKDSTYSLSSTLTLSKADYEKHKVYACEVTHQGLSSPVTKSFNRGEC

SEQ ID NO: 393 - protein, 212 aa, Artificial Sequence
  Description of Artificial Sequence: Synthetic polypeptide
IQLTQSPSFLSASVGDRVTITCSASSSVSYMFWYQQKPGKAPKLLIYRTSNLASGVPPRFSGSGSGTEYTLTISSLQPEDFATYYCQQFHDYPRTFGGGTKVEIKRTVAAPSVFIFPPSDEQLKSGTASVVCLLNNFYPREAKVQWKVDNALQSGNSQESVTEQDSKDSTYSLSSTLTLSKADYEKHKVYACEVTHQGLSSPVTKSFNRGEC

SEQ ID NO: 394 - protein, 212 aa, Artificial Sequence
  Description of Artificial Sequence: Synthetic polypeptide
IQLTQSPSFLSASVGDRVTITCSASSSVSYMFWYQQKPGKAPKLLIYRTSNLASGVPSRFSGSGSGTEFTLTISSLQPEDFATYYCQQFHDYPRTFGGGTKVEIKRTVAAPSVFIFPPSDEQLKSGTASVVCLLNNFYPREAKVQWKVDNALQSGNSQESVTEQDSKDSTYSLSSTLTLSKADYEKHKVYACEVTHQGLSSPVTKSFNRGEC

SEQ ID NO: 395 - protein, 212 aa, Artificial Sequence
  Description of Artificial Sequence: Synthetic polypeptide
IQLTQSPSFLSASVGDRVTITCSASSSVSYMFWYQQKPGKAPKLLIYRTSNLASGVPSRFSGSGSGTEFTLTISSLQPEDFATYYCQQFHQYPRTFGGGTKVEIKRTVAAPSVFIFPPSDEQLKSGTASVVCLLNNFYPREAKVQWKVDNALQSGNSQESVTEQDSKDSTYSLSSTLTLSKADYEKHKVYACEVTHQGLSSPVTKSFNRGEC

SEQ ID NO: 396 - protein, 212 aa, Artificial Sequence
  Description of Artificial Sequence: Synthetic polypeptide
IQLTQSPSFLSASVGDRVTITCSASSSVSYMFWYQQKPGKAPKLLIYRTSNLASGVPSRFSGSGSGTEYTLTISSLQPEDFATYYCQQFHDYPRTFGGGTKVEIKRTVAAPSVFIFPPSDEQLKSGTASVVCLLNNFYPREAKVQWKVDNALQSGNSQESVTEQDSKDSTYSLSSTLTLSKADYEKHKVYACEVTHQGLSSPVTKSFNRGEC

SEQ ID NO: 397 - protein, 212 aa, Artificial Sequence
  Description of Artificial Sequence: Synthetic polypeptide
IQLTQSPSFLSASVGDRVTITCSASSSVSYMFWYQQKPGKAPKPWIYRTSNLASGVPPRFSGSGSGTEYTLTISSLQPEDFATYYCQQFHDYPRTFGGGTKVEIKRTVAAPSVFIFPPSDEQLKSGTASVVCLLNNFYPREAKVQWKVDNALQSGNSQESVTEQDSKDSTYSLSSTLTLSKADYEKHKVYACEVTHQGLSSPVTKSFNRGEC

SEQ ID NO: 398 - protein, 212 aa, Artificial Sequence
  Description of Artificial Sequence: Synthetic polypeptide
IQLTQSPSFLSASVGDRVTITCSASSSVSYMFWYQQKPGKAPKPWIYRTSNLASGVPSRFSGSGSGTEFTLTISSLQPEDFATYYCQQFHDYPRTFGGGTKVEIKRTVAAPSVFIFPPSDEQLKSGTASVVCLLNNFYPREAKVQWKVDNALQSGNSQESVTEQDSKDSTYSLSSTLTLSKADYEKHKVYACEVTHQGLSSPVTKSFNRGEC

SEQ ID NO: 399 - protein, 212 aa, Artificial Sequence
  Description of Artificial Sequence: Synthetic polypeptide
IQMTQSPSSLSASVGDRVTITCSASSSVNYIYWYQQKPGKAPKLLIYRTSNLASGVPSRFSGSGSGTDFTLTISSLQPEDFATYYCQQYHSYPLTFGGGTKVEIKRTVAAPSVFIFPPSDEQLKSGTASVVCLLNNFYPREAKVQWKVDNALQSGNSQESVTEQDSKDSTYSLSSTLTLSKADYEKHKVYACEVTHQGLSSPVTKSFNRGEC

SEQ ID NO: 400 - protein, 216 aa, Artificial Sequence
  Description of Artificial Sequence: Synthetic polypeptide
QAVVTQEPSLTVSPGGTVTLTCGSSTGAVTTSNYANWVQQKPGKSPRGLIGGTNKRAPGVPARFSGSLLGGKAALTISGAQPEDEADYYCALWYSNHWVFGGGTKLTVLRTVAAPSVFIFPPSDEQLKSGTASVVCLLNNFYPREAKVQWKVDNALQSGNSQESVTEQDSKDSTYSLSSTLTLSKADYEKHKVYACEVTHQGLSSPVTKSFNRGEC

SEQ ID NO: 401 - protein, 448 aa, Artificial Sequence
  Description of Artificial Sequence: Synthetic polypeptide
EVQLVESGGGLVQPGGSLRLSCAASGFTFSSFGMHWVRQAPGKGLEWVAYISSGNSAIYYADTVNGRFTISRDNPKNTLYLQMNSLRAEDTAVYYCARLRYGNSFDYWGQGTLVTVSSASTKGPSVFPLAPSSKSTSGGTAALGCLVKDYFPEPVTVSWNSGALTSGVHTFPAVLQSSGLYSLSSVVTVPSSSLGTQTYICNVNHKPSNTKVDKRVEPKSCDKTHTCPPCPAPEFEGGPSVFLFPPKPKDTLMISRTPEVTCVVVDVSHEDPEVKFNWYVDGVEVHNAKTKPREEQYNSTYRVVSVLTVLHQDWLNGKEYKCKVSNKALPASIEKTISKAKGQPREPQVCTLPPSRDELTKNQVSLTCLVEGFYPSDIAVEWESNGQPENNYKTTPPVLDSDGSFFLYSDLTVDKSRWQQGNVFSCSVMHEALHNHYTQESLSLSPGK

SEQ ID NO: 402 - protein, 448 aa, Artificial Sequence
  Description of Artificial Sequence: Synthetic polypeptide
EVQLVESGGGLVQPGGSLRLSCAASGFTFSSFGMHWVRQAPGKGLEWVSYISSGNSAIYYADTVNGRFTISRDNAKNSLYLQMNSLRAEDTAVYYCARLRYGNSFDYWGQGTLVTVSSASTKGPSVFPLAPSSKSTSGGTAALGCLVKDYFPEPVTVSWNSGALTSGVHTFPAVLQSSGLYSLSSVVTVPSSSLGTQTYICNVNHKPSNTKVDKRVEPKSCDKTHTCPPCPAPEFEGGPSVFLFPPKPKDTLMISRTPEVTCVVVDVSHEDPEVKFNWYVDGVEVHNAKTKPREEQYNSTYRVVSVLTVLHQDWLNGKEYKCKVSNKALPASIEKTISKAKGQPREPQVCTLPPSRDELTKNQVSLTCLVEGFYPSDIAVEWESNGQPENNYKTTPPVLDSDGSFFLYSDLTVDKSRWQQGNVFSCSVMHEALHNHYTQESLSLSPGK

SEQ ID NO: 403 - protein, 448 aa, Artificial Sequence
  Description of Artificial Sequence: Synthetic polypeptide
QIQLVQSGAEVKKPGASVKVSCKASGYTFTNSGMNWVRQAPGQGLEWMGWINTNTGEPTFAEEFRGRVTFTLDTSASTAYMELSRLRSDDTAVYYCARYYYGNSFAYWGQGTLVTVSSASTKGPSVFPLAPSSKSTSGGTAALGCLVKDYFPEPVTVSWNSGALTSGVHTFPAVLQSSGLYSLSSVVTVPSSSLGTQTYICNVNHKPSNTKVDKRVEPKSCDKTHTCPPCPAPEFEGGPSVFLFPPKPKDTLMISRTPEVTCVVVDVSHEDPEVKFNWYVDGVEVHNAKTKPREEQYNSTYRVVSVLTVLHQDWLNGKEYKCKVSNKALPASIEKTISKAKGQPREPQVCTLPPSRDELTKNQVSLTCLVEGFYPSDIAVEWESNGQPENNYKTTPPVLDSDGSFFLYSDLTVDKSRWQQGNVFSCSVMHEALHNHYTQESLSLSPGK

SEQ ID NO: 404 - protein, 451 aa, Artificial Sequence
  Description of Artificial Sequence: Synthetic polypeptide
QVQLVQSGAEVKKPGASVKVSCKASGYTFTNFGITWVRQAPGQGLEWIGEIYPSSGNTFYNEKFKGRVTLTADKSSSAAYMELRSLRSDDTAVYYCARGGGPLRSRYFDYWGQGTLVTVSSASTKGPSVFPLAPSSKSTSGGTAALGCLVKDYFPEPVTVSWNSGALTSGVHTFPAVLQSSGLYSLSSVVTVPSSSLGTQTYICNVNHKPSNTKVDKRVEPKSCDKTHTCPPCPAPEFEGGPSVFLFPPKPKDTLMISRTPEVTCVVVDVSHEDPEVKFNWYVDGVEVHNAKTKPREEQYNSTYRVVSVLTVLHQDWLNGKEYKCKVSNKALPASIEKTISKAKGQPREPQVCTLPPSRDELTKNQVSLTCLVEGFYPSDIAVEWESNGQPENNYKTTPPVLDSDGSFFLYSDLTVDKSRWQQGNVFSCSVMHEALHNHYTQESLSLSPGK

SEQ ID NO: 405 - protein, 451 aa, Artificial Sequence
  Description of Artificial Sequence: Synthetic polypeptide
QVQLVQSGAEVKKPGASVKVSCKASGYTFTNFGITWVRQAPGQGLEWMGEIYPSSGNTFYNEKFKGRVTMTTDTSTSTAYMELRSLRSDDTAVYYCARGGGPLRSRYFDYWGQGTLVTVSSASTKGPSVFPLAPSSKSTSGGTAALGCLVKDYFPEPVTVSWNSGALTSGVHTFPAVLQSSGLYSLSSVVTVPSSSLGTQTYICNVNHKPSNTKVDKRVEPKSCDKTHTCPPCPAPEFEGGPSVFLFPPKPKDTLMISRTPEVTCVVVDVSHEDPEVKFNWYVDGVEVHNAKTKPREEQYNSTYRVVSVLTVLHQDWLNGKEYKCKVSNKALPASIEKTISKAKGQPREPQVCTLPPSRDELTKNQVSLTCLVEGFYPSDIAVEWESNGQPENNYKTTPPVLDSDGSFFLYSDLTVDKSRWQQGNVFSCSVMHEALHNHYTQESLSLSPGK

SEQ ID NO: 406 - protein, 448 aa, Artificial Sequence
  Description of Artificial Sequence: Synthetic polypeptide
QVQLVQSGAEVKKPGASVKVSCKASGYTFTNSGMNWVRQAPGQGLEWMGWINTNTGEPTFAEEFRGRVTMTRDTSISTAYMELSRLRSDDTAVYYCARYYYGNSFAYWGQGTLVTVSSASTKGPSVFPLAPSSKSTSGGTAALGCLVKDYFPEPVTVSWNSGALTSGVHTFPAVLQSSGLYSLSSVVTVPSSSLGTQTYICNVNHKPSNTKVDKRVEPKSCDKTHTCPPCPAPEFEGGPSVFLFPPKPKDTLMISRTPEVTCVVVDVSHEDPEVKFNWYVDGVEVHNAKTKPREEQYNSTYRVVSVLTVLHQDWLNGKEYKCKVSNKALPASIEKTISKAKGQPREPQVCTLPPSRDELTKNQVSLTCLVEGFYPSDIAVEWESNGQPENNYKTTPPVLDSDGSFFLYSDLTVDKSRWQQGNVFSCSVMHEALHNHYTQESLSLSPGK

SEQ ID NO: 407 - protein, 448 aa, Artificial Sequence
  Description of Artificial Sequence: Synthetic polypeptide
QVQLVQSGAEVKKPGASVKVSCKASGYTFTNYGMNWVRQAPGQGLEWMGWINTNTGEPTYAEEFKGRVTMTRDTSISTAYMELSRLRSDDTAVYYCARYFYGNSFVYWGQGTLVTVSSASTKGPSVFPLAPSSKSTSGGTAALGCLVKDYFPEPVTVSWNSGALTSGVHTFPAVLQSSGLYSLSSVVTVPSSSLGTQTYICNVNHKPSNTKVDKRVEPKSCDKTHTCPPCPAPEFEGGPSVFLFPPKPKDTLMISRTPEVTCVVVDVSHEDPEVKFNWYVDGVEVHNAKTKPREEQYNSTYRVVSVLTVLHQDWLNGKEYKCKVSNKALPASIEKTISKAKGQPREPQVCTLPPSRDELTKNQVSLTCLVEGFYPSDIAVEWESNGQPENNYKTTPPVLDSDGSFFLYSDLTVDKSRWQQGNVFSCSVMHEALHNHYTQESLSLSPGK

SEQ ID NO: 408 - protein, 449 aa, Artificial Sequence
  Description of Artificial Sequence: Synthetic polypeptide
QVQLVQSGAEVKKPGSSVKVSCKASGYAFNNYWMNWVRQAPGQGLEWMGQISPGNGNSNFNGKFKGRVTITADKSTSTAYMELSSLRSEDTAVYYCARGGRYGNAMDYWGQGTTVTVSSASTKGPSVFPLAPSSKSTSGGTAALGCLVKDYFPEPVTVSWNSGALTSGVHTFPAVLQSSGLYSLSSVVTVPSSSLGTQTYICNVNHKPSNTKVDKRVEPKSCDKTHTCPPCPAPEFEGGPSVFLFPPKPKDTLMISRTPEVTCVVVDVSHEDPEVKFNWYVDGVEVHNAKTKPREEQYNSTYRVVSVLTVLHQDWLNGKEYKCKVSNKALPASIEKTISKAKGQPREPQVCTLPPSRDELTKNQVSLTCLVEGFYPSDIAVEWESNGQPENNYKTTPPVLDSDGSFFLYSDLTVDKSRWQQGNVFSCSVMHEALHNHYTQESLSLSPGK

SEQ ID NO: 409 - protein, 449 aa, Artificial Sequence
  Description of Artificial Sequence: Synthetic polypeptide
QVQLVQSGAEVKKPGSSVKVSCKASGYAFSSYWMNWVRQAPGQGLEWIGQIYPGNGNSNFNGKFKARVTLTADKSSSTAYMELSSLRSEDTAVYYCARGGRFGNAMDYWGQGTTVTVSSASTKGPSVFPLAPSSKSTSGGTAALGCLVKDYFPEPVTVSWNSGALTSGVHTFPAVLQSSGLYSLSSVVTVPSSSLGTQTYICNVNHKPSNTKVDKRVEPKSCDKTHTCPPCPAPEFEGGPSVFLFPPKPKDTLMISRTPEVTCVVVDVSHEDPEVKFNWYVDGVEVHNAKTKPREEQYNSTYRVVSVLTVLHQDWLNGKEYKCKVSNKALPASIEKTISKAKGQPREPQVCTLPPSRDELTKNQVSLTCLVEGFYPSDIAVEWESNGQPENNYKTTPPVLDSDGSFFLYSDLTVDKSRWQQGNVFSCSVMHEALHNHYTQESLSLSPGK

SEQ ID NO: 410 - protein, 449 aa, Artificial Sequence
  Description of Artificial Sequence: Synthetic polypeptide
QVQLVQSGAEVKKPGSSVKVSCKASGYAFSSYWMNWVRQAPGQGLEWMGQIYPGNGNSNFNGKFKARVTITADKSTSTAYMELSSLRSEDTAVYYCARGGRFGNAMDYWGQGTTVTVSSASTKGPSVFPLAPSSKSTSGGTAALGCLVKDYFPEPVTVSWNSGALTSGVHTFPAVLQSSGLYSLSSVVTVPSSSLGTQTYICNVNHKPSNTKVDKRVEPKSCDKTHTCPPCPAPEFEGGPSVFLFPPKPKDTLMISRTPEVTCVVVDVSHEDPEVKFNWYVDGVEVHNAKTKPREEQYNSTYRVVSVLTVLHQDWLNGKEYKCKVSNKALPASIEKTISKAKGQPREPQVCTLPPSRDELTKNQVSLTCLVEGFYPSDIAVEWESNGQPENNYKTTPPVLDSDGSFFLYSDLTVDKSRWQQGNVFSCSVMHEALHNHYTQESLSLSPGK

SEQ ID NO: 411 - protein, 220 aa, Artificial Sequence
  Description of Artificial Sequence: Synthetic polypeptide
DIVMTQSPDSLAVSLGERATINCKSSQSLLNSGNQKNYLTWYQQKPGQPPKLLIFWASTRESGVPDRFSGSGSGTDFTLTISSLQAEDVAVYYCQNNYYYPLTFGGGTKVEIKRTVAAPSVFIFPPSDEQLKSGTASVVCLLNNFYPREAKVQWKVDNALQSGNSQESVTEQDSKDSTYSLSSTLTLSKADYEKHKVYACEVTHQGLSSPVTKSFNRGEC

SEQ ID NO: 412 - protein, 220 aa, Artificial Sequence
  Description of Artificial Sequence: Synthetic polypeptide
DIVMTQSPDSLAVSLGERATINCKSSQSLLNSGNQKNYLTWYQQKPGQPPKLLIYWASTRESGVPDRFSGSGSGTDFTLTISSLQAEDVAVYYCQNAYFYPYTFGGGTKVEIKRTVAAPSVFIFPPSDEQLKSGTASVVCLLNNFYPREAKVQWKVDNALQSGNSQESVTEQDSKDSTYSLSSTLTLSKADYEKHKVYACEVTHQGLSSPVTKSFNRGEC

SEQ ID NO: 413 - protein, 220 aa, Artificial Sequence
  Description of Artificial Sequence: Synthetic polypeptide
DIVMTQSPDSLAVSLGERATINCKSSQSLLNSGNQKNYLTWYQQKPGQPPKLLIYWASTRESGVPDRFSGSGSGTDFTLTISSLQAEDVAVYYCQNNYFYPLTFGGGTKVEIKRTVAAPSVFIFPPSDEQLKSGTASVVCLLNNFYPREAKVQWKVDNALQSGNSQESVTEQDSKDSTYSLSSTLTLSKADYEKHKVYACEVTHQGLSSPVTKSFNRGEC

SEQ ID NO: 414 - protein, 220 aa, Artificial Sequence
  Description of Artificial Sequence: Synthetic polypeptide
DIVMTQSPDSLAVSLGERATINCKSSQSLLNSGNQKNYLTWYQQKPGQPPKLLIYWASTRESGVPDRFSGSGSGTDFTLTISSLQAEDVAVYYCQNNYNFPLTFGGGTKVEIKRTVAAPSVFIFPPSDEQLKSGTASVVCLLNNFYPREAKVQWKVDNALQSGNSQESVTEQDSKDSTYSLSSTLTLSKADYEKHKVYACEVTHQGLSSPVTKSFNRGEC

SEQ ID NO: 415 - protein, 220 aa, Artificial Sequence
  Description of Artificial Sequence: Synthetic polypeptide
DIVMTQSPDSLAVSLGERATINCKSSQSLLNSGNQKNYLTWYQQKPGQPPKLLIYWASTRESGVPDRFSGSGSGTDFTLTISSLQAEDVAVYYCQNNYYYPLTFGGGTKVEIKRTVAAPSVFIFPPSDEQLKSGTASVVCLLNNFYPREAKVQWKVDNALQSGNSQESVTEQDSKDSTYSLSSTLTLSKADYEKHKVYACEVTHQGLSSPVTKSFNRGEC

SEQ ID NO: 416 - protein, 220 aa, Artificial Sequence
  Description of Artificial Sequence: Synthetic polypeptide
DIVMTQSPDSLAVSLGERATINCKSSQSLLNSGNQRNYLTWYQQKPGQPPKLLIYWASTRESGVPDRFSGSGSGTDFTLTISSLQAEDVAVYYCQNAYFYPYTFGGGTKVEIKRTVAAPSVFIFPPSDEQLKSGTASVVCLLNNFYPREAKVQWKVDNALQSGNSQESVTEQDSKDSTYSLSSTLTLSKADYEKHKVYACEVTHQGLSSPVTKSFNRGEC

SEQ ID NO: 417 - protein, 220 aa, Artificial Sequence
  Description of Artificial Sequence: Synthetic polypeptide
DIVMTQSPDSLAVSLGERATINCRSSQSLFSSGNQKNYLTWYQQKPGQPPKLLIYWASTRESGVPDRFSGSGSGADFTLTISSLQAEDVAVYYCQNDYYYPLTFGGGTKVEIKRTVAAPSVFIFPPSDEQLKSGTASVVCLLNNFYPREAKVQWKVDNALQSGNSQESVTEQDSKDSTYSLSSTLTLSKADYEKHKVYACEVTHQGLSSPVTKSFNRGEC

SEQ ID NO: 418 - protein, 220 aa, Artificial Sequence
  Description of Artificial Sequence: Synthetic polypeptide
DIVMTQSPDSLAVSLGERATINCRSSQSLFSSGNQKNYLTWYQQKPGQPPKLLIYWASTRESGVPDRFSGSGSGTDFTLTISSLQAEDVAVYYCQNDYYYPLTFGGGTKVEIKRTVAAPSVFIFPPSDEQLKSGTASVVCLLNNFYPREAKVQWKVDNALQSGNSQESVTEQDSKDSTYSLSSTLTLSKADYEKHKVYACEVTHQGLSSPVTKSFNRGEC

SEQ ID NO: 419 - protein, 220 aa, Artificial Sequence
  Description of Artificial Sequence: Synthetic polypeptide
DIVMTQSPDSLAVSLGERATMNCKSSQSLLNSGNQKNYLTWYQQKPGQPPKLLIYWASTRESGVPDRFSGSGSGTDFTLTISSLQAEDVAVYYCQNAYFYPYTFGGGTKVEIKRTVAAPSVFIFPPSDEQLKSGTASVVCLLNNFYPREAKVQWKVDNALQSGNSQESVTEQDSKDSTYSLSSTLTLSKADYEKHKVYACEVTHQGLSSPVTKSFNRGEC

SEQ ID NO: 420 - protein, 120 aa, Artificial Sequence
  Description of Artificial Sequence: Synthetic polypeptide
QVQLVQSGAEVKKPGASVKVSCKASGYTFTSYYIHWVRQAPGQGLEWIGCIYPGNVNTNYNEKFKDRATLTVDTSISTAYMELSRLRSDDTAVYFCTRSHYGLDWNFDVWGQGTTVTVSS

SEQ ID NO: 421 - protein, 120 aa, Artificial Sequence
  Description of Artificial Sequence: Synthetic polypeptide
QVQLVQSGAEVKKPGASVKVSCKASGYTFTSYYIHWVRQAPGQGLEWIGSIYPGNVNTNYNEKFKDRATLTVDTSISTAYMELSRLRSDDTAVYFCTRSHYGLDWNFDVWGQGTTVTVSS

SEQ ID NO: 422 - protein, 120 aa, Artificial Sequence
  Description of Artificial Sequence: Synthetic polypeptide
QVQLVQSGAEVKKPGASVKVSCKASGYTFTSYYIHWVRQAPGQGLEWIGAIYPGNVNTNYNEKFKDRATLTVDTSISTAYMELSRLRSDDTAVYFCTRSHYGLDWNFDVWGQGTTVTVSS

SEQ ID NO: 423 - protein, 120 aa, Artificial Sequence
  Description of Artificial Sequence: Synthetic polypeptide
QVQLVQSGAEVKKPGASVKVSCKASGYTFTSYYIHWVRQAPGQGLEWIGGIYPGNVNTNYNEKFKDRATLTVDTSISTAYMELSRLRSDDTAVYFCTRSHYGLDWNFDVWGQGTTVTVSS

SEQ ID NO: 424 - protein, 107 aa, Artificial Sequence
  Description of Artificial Sequence: Synthetic polypeptide
DIQMTQSPSSLSASVGDRVTITCHASQNIYVWLNWYQQKPGKAPKLLIYKASNLHTGVPSRFSGSGSGTDFTLTISSLQPEDFATYYCQQGQTYPYTFGGGTKVEIK

SEQ ID NO: 425 - protein, 450 aa, Artificial Sequence
  Description of Artificial Sequence: Synthetic polypeptide
QVQLVQSGAEVKKPGASVKVSCKASGYTFTSYYIHWVRQAPGQGLEWIGCIYPGNVNTNYNEKFKDRATLTVDTSISTAYMELSRLRSDDTAVYFCTRSHYGLDWNFDVWGQGTTVTVSSASTKGPSVFPLAPSSKSTSGGTAALGCLVKDYFPEPVTVSWNSGALTSGVHTFPAVLQSSGLYSLSSVVTVPSSSLGTQTYICNVNHKPSNTKVDKRVEPKSCDKTHTCPPCPAPEFEGGPSVFLFPPKPKDTLMISRTPEVTCVVVDVSHEDPEVKFNWYVDGVEVHNAKTKPREEQYNSTYRVVSVLTVLHQDWLNGKEYKCKVSNKALPASIEKTISKAKGQPREPQVCTLPPSRDELTKNQVSLTCLVEGFYPSDIAVEWESNGQPENNYKTTPPVLDSDGSFFLYSDLTVDKSRWQQGNVFSCSVMHEALHNHYTQESLSLSPGK

SEQ ID NO: 426 - protein, 214 aa, Artificial Sequence
  Description of Artificial Sequence: Synthetic polypeptide
DIQMTQSPSSLSASVGDRVTITCHASQNIYVWLNWYQQKPGKAPKLLIYKASNLHTGVPSRFSGSGSGTDFTLTISSLQPEDFATYYCQQGQTYPYTFGGGTKVEIKRTVAAPSVFIFPPSDEQLKSGTASVVCLLNNFYPREAKVQWKVDNALQSGNSQESVTEQDSKDSTYSLSSTLTLSKADYEKHKVYACEVTHQGLSSPVTKSFNRGEC

SEQ ID NO: 427 - protein, 479 aa, Artificial Sequence
  Description of Artificial Sequence: Synthetic polypeptide
QVQLVQSGAEVKKPGASVKVSCKASGYTFTSYYIHWVRQAPGQGLEWIGCIYPGNVNTNYNEKFKDRATLTVDTSISTAYMELSRLRSDDTAVYFCTRSHYGLDWNFDVWGQGTTVTVSSGKPGSGKPGSGKPGSGKPGSDIQMTQSPSSLSASVGDRVTITCHASQNIYVWLNWYQQKPGKAPKLLIYKASNLHTGVPSRFSGSGSGTDFTLTISSLQPEDFATYYCQQGQTYPYTFGGGTKVEIKEPKSSDKTHTCPPCPAPEFEGGPSVFLFPPKPKDTLMISRTPEVTCVVVDVSHEDPEVKFNWYVDGVEVHNAKTKPREEQYNSTYRVVSVLTVLHQDWLNGKEYKCKVSNKALPASIEKTISKAKGQPREPQVYTLPPCRKKLTKNQVSLTCLVKGFYPSDIAVEWESNGQPENNYKTTPPVLKSDGSFFLYSKLTVDKSRWQQGNVFSCSVMHEALHNHYTQKSLSLSPGK

SEQ ID NO: 428 - protein, 479 aa, Artificial Sequence
  Description of Artificial Sequence: Synthetic polypeptide
QVQLVQSGAEVKKPGASVKVSCKASGYTFTSYYIHWVRQAPGQGLEWIGGIYPGNVNTNYNEKFKDRATLTVDTSISTAYMELSRLRSDDTAVYFCTRSHYGLDWNFDVWGQGTTVTVSSGKPGSGKPGSGKPGSGKPGSDIQMTQSPSSLSASVGDRVTITCHASQNIYVWLNWYQQKPGKAPKLLIYKASNLHTGVPSRFSGSGSGTDFTLTISSLQPEDFATYYCQQGQTYPYTFGGGTKVEIKEPKSSDKTHTCPPCPAPEFEGGPSVFLFPPKPKDTLMISRTPEVTCVVVDVSHEDPEVKFNWYVDGVEVHNAKTKPREEQYNSTYRVVSVLTVLHQDWLNGKEYKCKVSNKALPASIEKTISKAKGQPREPQVYTLPPCRKKLTKNQVSLTCLVKGFYPSDIAVEWESNGQPENNYKTTPPVLKSDGSFFLYSKLTVDKSRWQQGNVFSCSVMHEALHNHYTQKSLSLSPGK

SEQ ID NO: 429 - protein, 479 aa, Artificial Sequence
  Description of Artificial Sequence: Synthetic polypeptide
QVQLVQSGAEVKKPGASVKVSCKASGYTFTSYYIHWVRQAPGQGLEWIGAIYPGNVNTNYNEKFKDRATLTVDTSISTAYMELSRLRSDDTAVYFCTRSHYGLDWNFDVWGQGTTVTVSSGKPGSGKPGSGKPGSGKPGSDIQMTQSPSSLSASVGDRVTITCHASQNIYVWLNWYQQKPGKAPKLLIYKASNLHTGVPSRFSGSGSGTDFTLTISSLQPEDFATYYCQQGQTYPYTFGGGTKVEIKEPKSSDKTHTCPPCPAPEFEGGPSVFLFPPKPKDTLMISRTPEVTCVVVDVSHEDPEVKFNWYVDGVEVHNAKTKPREEQYNSTYRVVSVLTVLHQDWLNGKEYKCKVSNKALPASIEKTISKAKGQPREPQVYTLPPCRKKLTKNQVSLTCLVKGFYPSDIAVEWESNGQPENNYKTTPPVLKSDGSFFLYSKLTVDKSRWQQGNVFSCSVMHEALHNHYTQKSLSLSPGK

SEQ ID NO: 430 - protein, 479 aa, Artificial Sequence
  Description of Artificial Sequence: Synthetic polypeptide
QVQLVQSGAEVKKPGASVKVSCKASGYTFTSYYIHWVRQAPGQGLEWIGSIYPGNVNTNYNEKFKDRATLTVDTSISTAYMELSRLRSDDTAVYFCTRSHYGLDWNFDVWGQGTTVTVSSGKPGSGKPGSGKPGSGKPGSDIQMTQSPSSLSASVGDRVTITCHASQNIYVWLNWYQQKPGKAPKLLIYKASNLHTGVPSRFSGSGSGTDFTLTISSLQPEDFATYYCQQGQTYPYTFGGGTKVEIKEPKSSDKTHTCPPCPAPEFEGGPSVFLFPPKPKDTLMISRTPEVTCVVVDVSHEDPEVKFNWYVDGVEVHNAKTKPREEQYNSTYRVVSVLTVLHQDWLNGKEYKCKVSNKALPASIEKTISKAKGQPREPQVYTLPPCRKKLTKNQVSLTCLVKGFYPSDIAVEWESNGQPENNYKTTPPVLKSDGSFFLYSKLTVDKSRWQQGNVFSCSVMHEALHNHYTQKSLSLSPGK

SEQ ID NO: 431 - protein, 472 aa, Artificial Sequence
  Description of Artificial Sequence: Synthetic polypeptide
QVQLVQSGAEVKKPGASVKVSCKASDYTFSNYYIEWVRQAPGQGLEWMGEILPGNGNTVYNEKFKDRVTMTVDTSTSTAYMELRSLRSDDTAVYYCARWGDYALFANWGQGTLVTVSSGGGGSGGGGSGGGGSDIQMTQSPSTLSASVGDRVTITCKASQNVGTNVAWYQQKPGKAPKALIYSASYRYSGVPSRFSGSGSGTEFTLTISSLQPDDFATYYCQQYNSYPFTFGQGTKLEIKEPKSSDKTHTCPPCPAPEFEGGPSVFLFPPKPKDTLMISRTPEVTCVVVDVSHEDPEVKFNWYVDGVEVHNAKTKPREEQYNSTYRVVSVLTVLHQDWLNGKEYKCKVSNKALPASIEKTISKAKGQPREPQVYTLPPCRKKLTKNQVSLTCLVKGFYPSDIAVEWESNGQPENNYKTTPPVLKSDGSFFLYSKLTVDKSRWQQGNVFSCSVMHEALHNHYTQKSLSLSPGK

SEQ ID NO: 432 - protein, 476 aa, Artificial Sequence
  Description of Artificial Sequence: Synthetic polypeptide
QVQLVQSGAEVKKPGASVKVSCKASGYTFTDYFMNWVRQAPGQGLEWMGVINPYNDITIYNQKFQGRVTMTVDRSTSTVYMELSSLRSEDTAVYYCAREGVLYDGYYEGAYWGQGTLVTVSSGGGGSGGGGSGGGGSDIQLTQSPSFLSASVGDRVTITCKASQNVGIAVAWYQQKPGKAPKLLIYAASNRYTGVPSRFSGSGSGTEFTLTISSLQPEDFATYYCQQYSTYPYTFGQGTKLEIKEPKSSDKTHTCPPCPAPEFEGGPSVFLFPPKPKDTLMISRTPEVTCVVVDVSHEDPEVKFNWYVDGVEVHNAKTKPREEQYNSTYRVVSVLTVLHQDWLNGKEYKCKVSNKALPASIEKTISKAKGQPREPQVYTLPPCRKKLTKNQVSLTCLVKGFYPSDIAVEWESNGQPENNYKTTPPVLKSDGSFFLYSKLTVDKSRWQQGNVFSCSVMHEALHNHYTQKSLSLSPGK

SEQ ID NO: 433 - protein, 472 aa, Artificial Sequence
  Description of Artificial Sequence: Synthetic polypeptide
QVQLVQSGAEVKKPGASVKVSCKATDYIFSNYYIEWVRQAPGQGLEWMGEILPGTGNTVYNEKFKDRVTMTVDTSTSTVYMELSSLRSEDTAVYYCARWGDYALFANWGQGTLVTVSSGGGGSGGGGSGGGGSDIQMTQSPSFLSASVGDRVTITCKASQNVGTNVAWYQQKPGKAPKPLIYSTSYRYSGVPSRFSGSGSGTEFTLTISSLQPEDFATYYCQQYNNYPLTFGGGTKVEIKEPKSSDKTHTCPPCPAPEFEGGPSVFLFPPKPKDTLMISRTPEVTCVVVDVSHEDPEVKFNWYVDGVEVHNAKTKPREEQYNSTYRVVSVLTVLHQDWLNGKEYKCKVSNKALPASIEKTISKAKGQPREPQVYTLPPCRKKLTKNQVSLTCLVKGFYPSDIAVEWESNGQPENNYKTTPPVLKSDGSFFLYSKLTVDKSRWQQGNVFSCSVMHEALHNHYTQKSLSLSPGK

SEQ ID NO: 434 - protein, 472 aa, Artificial Sequence
  Description of Artificial Sequence: Synthetic polypeptide
QVQLVQSGAEVKKPGASVKVSCKATDYIFSNYYIEWVRQAPGQGLEWMGEILPGTGNTVYNEKFKDRVTMTVDTSTSTVYMELSSLRSEDTAVYYCARWGDYALFANWGQGTLVTVSSGGGGSGGGGSGGGGSDIQMTQSPSTLSASVGDRVTITCKASQNVGTNVAWYQQKPGKAPKALIYSASYRYSGVPSRFSGSGSGTEFTLTISSLQPDDFATYYCQQYNSYPFTFGQGTKLEIKEPKSSDKTHTCPPCPAPEFEGGPSVFLFPPKPKDTLMISRTPEVTCVVVDVSHEDPEVKFNWYVDGVEVHNAKTKPREEQYNSTYRVVSVLTVLHQDWLNGKEYKCKVSNKALPASIEKTISKAKGQPREPQVYTLPPCRKKLTKNQVSLTCLVKGFYPSDIAVEWESNGQPENNYKTTPPVLKSDGSFFLYSKLTVDKSRWQQGNVFSCSVMHEALHNHYTQKSLSLSPGK

SEQ ID NO: 435 - protein, 479 aa, Artificial Sequence
  Description of Artificial Sequence: Synthetic polypeptide
QVQLVQSGAEVKKPGASVKVSCKASGYTFTSYYIHWVRQAPGQCLEWIGSIYPGNVNTNYNEKFKDRATLTVDTSISTAYMELSRLRSDDTAVYFCTRSHYGLDWNFDVWGQGTTVTVSSGKPGSGKPGSGKPGSGKPGSDIQMTQSPSSLSASVGDRVTITCHASQNIYVWLNWYQQKPGKAPKLLIYKASNLHTGVPSRFSGSGSGTDFTLTISSLQPEDFATYYCQQGQTYPYTFGCGTKVEIKEPKSSDKTHTCPPCPAPEFEGGPSVFLFPPKPKDTLMISRTPEVTCVVVDVSHEDPEVKFNWYVDGVEVHNAKTKPREEQYNSTYRVVSVLTVLHQDWLNGKEYKCKVSNKALPASIEKTISKAKGQPREPQVYTLPPCRKKLTKNQVSLTCLVKGFYPSDIAVEWESNGQPENNYKTTPPVLKSDGSFFLYSKLTVDKSRWQQGNVFSCSVMHEALHNHYTQKSLSLSPGK

SEQ ID NO: 436 - protein, 479 aa, Artificial Sequence
  Description of Artificial Sequence: Synthetic polypeptide
QVQLVQSGAEVKKPGASVKVSCKASGYTFTSYYIHWVRQAPGQGLEWIGSIYPGNVNTNYNEKFKDRATLTVDTSISTAYMELSRLRSDDTAVYFCTRSHYGLDWNFDVWGQGTTVTVSSGGGGSGGGGSGGGGSGGGGSDIQMTQSPSSLSASVGDRVTITCHASQNIYVWLNWYQQKPGKAPKLLIYKASNLHTGVPSRFSGSGSGTDFTLTISSLQPEDFATYYCQQGQTYPYTFGGGTKVEIKEPKSSDKTHTCPPCPAPEFEGGPSVFLFPPKPKDTLMISRTPEVTCVVVDVSHEDPEVKFNWYVDGVEVHNAKTKPREEQYNSTYRVVSVLTVLHQDWLNGKEYKCKVSNKALPASIEKTISKAKGQPREPQVYTLPPCRKKLTKNQVSLTCLVKGFYPSDIAVEWESNGQPENNYKTTPPVLKSDGSFFLYSKLTVDKSRWQQGNVFSCSVMHEALHNHYTQKSLSLSPGK

SEQ ID NO: 437 - protein, 451 aa, Artificial Sequence
  Description of Artificial Sequence: Synthetic polypeptide
QVQLQQWGAGLLKPSETLSLTCAVYGGSFSGYYWSWIRQSPEKGLEWIGEINHGGYVTYNPSLESRVTISVDTSKNQFSLKLSSVTAADTAVYYCARDYGPGNYDWYFDLWGRGTLVTVSSASTKGPSVFPLAPSSKSTSGGTAALGCLVKDYFPEPVTVSWNSGALTSGVHTFPAVLQSSGLYSLSSVVTVPSSSLGTQTYICNVNHKPSNTKVDKRVEPKSCDKTHTCPPCPAPEFEGGPSVFLFPPKPKDTLMISRTPEVTCVVVDVSHEDPEVKFNWYVDGVEVHNAKTKPREEQYNSTYRVVSVLTVLHQDWLNGKEYKCKVSNKALPASIEKTISKAKGQPREPQVCTLPPSRDELTKNQVSLTCLVEGFYPSDIAVEWESNGQPENNYKTTPPVLDSDGSFFLYSDLTVDKSRWQQGNVFSCSVMHEALHNHYTQESLSLSPGK

SEQ ID NO: 438 - protein, 216 aa, Artificial Sequence
  Description of Artificial Sequence: Synthetic polypeptide
EIVLTQSPATLSLSPGERATLSCRASQSVSSYLAWYQQKPGQAPRLLIYDASNRATGIPARFSGSGSGTDFTLTISSLEPEDFAVYYCQQRSNWPPALTFGGGTKVEIKRTVAAPSVFIFPPSDEQLKSGTASVVCLLNNFYPREAKVQWKVDNALQSGNSQESVTEQDSKDSTYSLSSTLTLSKADYEKHKVYACEVTHQGLSSPVTKSFNRGEC

SEQ ID NO: 439 - protein, 449 aa, Artificial Sequence
  Description of Artificial Sequence: Synthetic polypeptide
QVQLVQSGAEVKKPGASVKVSCKASGYTFSSYWMHWVRQAPGQRLEWMGEINPGNGHTNYSQKFQGRVTITVDKSASTAYMELSSLRSEDTAVYYCARSFTTARAFAYWGQGTLVTVSSASTKGPSVFPLAPSSKSTSGGTAALGCLVKDYFPEPVTVSWNSGALTSGVHTFPAVLQSSGLYSLSSVVTVPSSSLGTQTYICNVNHKPSNTKVDKRVEPKSCDKTHTCPPCPAPEFEGGPSVFLFPPKPKDTLMISRTPEVTCVVVDVSHEDPEVKFNWYVDGVEVHNAKTKPREEQYNSTYRVVSVLTVLHQDWLNGKEYKCKVSNKALPASIEKTISKAKGQPREPQVCTLPPSRDELTKNQVSLTCLVEGFYPSDIAVEWESNGQPENNYKTTPPVLDSDGSFFLYSDLTVDKSRWQQGNVFSCSVMHEALHNHYTQESLSLSPGK

SEQ ID NO: 440 - protein, 214 aa, Artificial Sequence
  Description of Artificial Sequence: Synthetic polypeptide
DIVMTQSPPTLSLSPGERVTLSCRASQSISDYLHWYQQKPGQSPRLLIKYASQSISGIPARFSGSGSGTDFTLTISSLEPEDFAVYYCQDGHSFPPTFGGGTKVEIKRTVAAPSVFIFPPSDEQLKSGTASVVCLLNNFYPREAKVQWKVDNALQSGNSQESVTEQDSKDSTYSLSSTLTLSKADYEKHKVYACEVTHQGLSSPVTKSFNRGEC

SEQ ID NO: 441 - protein, 482 aa, Artificial Sequence
  Description of Artificial Sequence: Synthetic polypeptide
QVQLQQWGAGLLKPSETLSLTCAVYGGSFSGYYWSWIRQSPEKGLEWIGEINHGGYVTYNPSLESRVTISVDTSKNQFSLKLSSVTAADTAVYYCARDYGPGNYDWYFDLWGRGTLVTVSSGKPGSGKPGSGKPGSGKPGSEIVLTQSPATLSLSPGERATLSCRASQSVSSYLAWYQQKPGQAPRLLIYDASNRATGIPARFSGSGSGTDFTLTISSLEPEDFAVYYCQQRSNWPPALTFGGGTKVEIKEPKSSDKTHTCPPCPAPEFEGGPSVFLFPPKPKDTLMISRTPEVTCVVVDVSHEDPEVKFNWYVDGVEVHNAKTKPREEQYNSTYRVVSVLTVLHQDWLNGKEYKCKVSNKALPASIEKTISKAKGQPREPQVYTLPPCRKKLTKNQVSLTCLVKGFYPSDIAVEWESNGQPENNYKTTPPVLKSDGSFFLYSKLTVDKSRWQQGNVFSCSVMHEALHNHYTQKSLSLSPGK

SEQ ID NO: 442 - protein, 478 aa, Artificial Sequence
  Description of Artificial Sequence: Synthetic polypeptide
QVQLQQWGAGLLKPSETLSLTCAVYGGSFSGYYWSWIRQSPEKGLEWIGEINHGGYVTYNPSLESRVTISVDTSKNQFSLKLSSVTAADTAVYYCARDYGPGNYDWYFDLWGRGTLVTVSSGGGGSGGGGSGGGGSEIVLTQSPATLSLSPGERATLSCRASQSVSSYLAWYQQKPGQAPRLLIYDASNRATGIPARFSGSGSGTDFTLTISSLEPEDFAVYYCQQRSNWPPALTFGGGTKVEIKREPKSSDKTHTCPPCPAPEFEGGPSVFLFPPKPKDTLMISRTPEVTCVVVDVSHEDPEVKFNWYVDGVEVHNAKTKPREEQYNSTYRVVSVLTVLHQDWLNGKEYKCKVSNKALPASIEKTISKAKGQPREPQVYTLPPCRKKLTKNQVSLTCLVKGFYPSDIAVEWESNGQPENNYKTTPPVLKSDGSFFLYSKLTVDKSRWQQGNVFSCSVMHEALHNHYTQKSLSLSPGK

SEQ ID NO: 443 - protein, 492 aa, Artificial Sequence
  Description of Artificial Sequence: Synthetic polypeptide
QVQLQQWGAGLLKPSETLSLTCAVYGGSFSGYYWSWIRQSPEKGLEWIGEINHGGYVTYNPSLESRVTISVDTSKNQFSLKLSSVTAADTAVYYCARDYGPGNYDWYFDLWGRGTLVTVSSGGGGSGGGGSGGGGSGGGGSGGGGSGGGGSEIVLTQSPATLSLSPGERATLSCRASQSVSSYLAWYQQKPGQAPRLLIYDASNRATGIPARFSGSGSGTDFTLTISSLEPEDFAVYYCQQRSNWPPALTFGGGTKVEIKEPKSSDKTHTCPPCPAPEFEGGPSVFLFPPKPKDTLMISRTPEVTCVVVDVSHEDPEVKFNWYVDGVEVHNAKTKPREEQYNSTYRVVSVLTVLHQDWLNGKEYKCKVSNKALPASIEKTISKAKGQPREPQVYTLPPCRKKLTKNQVSLTCLVKGFYPSDIAVEWESNGQPENNYKTTPPVLKSDGSFFLYSKLTVDKSRWQQGNVFSCSVMHEALHNHYTQKSLSLSPGK

SEQ ID NO: 444 - protein, 482 aa, Artificial Sequence
  Description of Artificial Sequence: Synthetic polypeptide
EIVLTQSPATLSLSPGERATLSCRASQSVSSYLAWYQQKPGQAPRLLIYDASNRATGIPARFSGSGSGTDFTLTISSLEPEDFAVYYCQQRSNWPPALTFGGGTKVEIKGKPGSGKPGSGKPGSGKPGSQVQLQQWGAGLLKPSETLSLTCAVYGGSFSGYYWSWIRQSPEKGLEWIGEINHGGYVTYNPSLESRVTISVDTSKNQFSLKLSSVTAADTAVYYCARDYGPGNYDWYFDLWGRGTLVTVSSEPKSSDKTHTCPPCPAPEFEGGPSVFLFPPKPKDTLMISRTPEVTCVVVDVSHEDPEVKFNWYVDGVEVHNAKTKPREEQYNSTYRVVSVLTVLHQDWLNGKEYKCKVSNKALPASIEKTISKAKGQPREPQVYTLPPCRKKLTKNQVSLTCLVKGFYPSDIAVEWESNGQPENNYKTTPPVLKSDGSFFLYSKLTVDKSRWQQGNVFSCSVMHEALHNHYTQKSLSLSPGK

SEQ ID NO: 445 - protein, 478 aa, Artificial Sequence
  Description of Artificial Sequence: Synthetic polypeptide
QVQLQQWGAGLLKPSETLSLTCAVYGGSFSGYYWSWIRQSPEKGLEWIGEINHGGYVTYNPSLESRVTISVDTSKNQFSLKLSSVTAADTAVYYCARDYGPGNYDWYFDLWGRGTLVTVSSGGGGSGGGGSGGGGSEIVLTQSPATLSLSPGERATLSCRASQSVSSYLAWYQQKPGQAPRLLIYDASNRATGIPARFSGSGSGTDFTLTISSLEPEDFAVYYCQQRSNWPPALTFSGGTKVEIKREPKSSDKTHTCPPCPAPEFEGGPSVFLFPPKPKDTLMISRTPEVTCVVVDVSHEDPEVKFNWYVDGVEVHNAKTKPREEQYNSTYRVVSVLTVLHQDWLNGKEYKCKVSNKALPASIEKTISKAKGQPREPQVYTLPPCRKKLTKNQVSLTCLVKGFYPSDIAVEWESNGQPENNYKTTPPVLKSDGSFFLYSKLTVDKSRWQQGNVFSCSVMHEALHNHYTQKSLSLSPGK

SEQ ID NO: 446 - protein, 483 aa, Artificial Sequence
  Description of Artificial Sequence: Synthetic polypeptide
QVQLQESGPGLVKPSETLSLTCTVSGGSFSGYYWSWIRQPPGKGLEWIGEINHGGYVTYNPSLESRVTISVDTSKNQFSLKLSSVTAADTAVYYCARDYGPGNYDWYFDLWGRGTLVTVSSGKPGSGKPGSGKPGSGKPGSEIVLTQSPGTLSLSPGERATLSCRASQSVSSSYLAWYQQKPGQAPRLLIYDASNRATGIPDRFSGSGSGTDFTLTISRLEPEDFAVYYCQQRSNWPPALTFGGGTKVEIKEPKSSDKTHTCPPCPAPEFEGGPSVFLFPPKPKDTLMISRTPEVTCVVVDVSHEDPEVKFNWYVDGVEVHNAKTKPREEQYNSTYRVVSVLTVLHQDWLNGKEYKCKVSNKALPASIEKTISKAKGQPREPQVYTLPPCRKKLTKNQVSLTCLVKGFYPSDIAVEWESNGQPENNYKTTPPVLKSDGSFFLYSKLTVDKSRWQQGNVFSCSVMHEALHNHYTQKSLSLSPGK

SEQ ID NO: 447 - protein, 483 aa, Artificial Sequence
  Description of Artificial Sequence: Synthetic polypeptide
EVQLLESGGGLVQPGGSLRLSCAASGGSFSGYYWSWVRQAPGKGLEWVSEINHGGYVTYNPSLESRFTISRDNSKNTLYLQMNSLRAEDTAVYYCAKDYGPGNYDWYFDLWGRGTLVTVSSGKPGSGKPGSGKPGSGKPGSEIVLTQSPGTLSLSPGERATLSCRASQSVSSSYLAWYQQKPGQAPRLLIYDASNRATGIPDRFSGSGSGTDFTLTISRLEPEDFAVYYCQQRSNWPPALTFGGGTKVEIKEPKSSDKTHTCPPCPAPEFEGGPSVFLFPPKPKDTLMISRTPEVTCVVVDVSHEDPEVKFNWYVDGVEVHNAKTKPREEQYNSTYRVVSVLTVLHQDWLNGKEYKCKVSNKALPASIEKTISKAKGQPREPQVYTLPPCRKKLTKNQVSLTCLVKGFYPSDIAVEWESNGQPENNYKTTPPVLKSDGSFFLYSKLTVDKSRWQQGNVFSCSVMHEALHNHYTQKSLSLSPGK

SEQ ID NO: 448 - protein, 483 aa, Artificial Sequence
  Description of Artificial Sequence: Synthetic polypeptide
QVQLVQSGAEVKKPGSSVKVSCKASGGSFSGYYWSWVRQAPGQGLEWMGEINHGGYVTYNPSLESRVTITADESTSTAYMELSSLRSEDTAVYYCARDYGPGNYDWYFDLWGRGTLVTVSSGKPGSGKPGSGKPGSGKPGSEIVLTQSPGTLSLSPGERATLSCRASQSVSSSYLAWYQQKPGQAPRLLIYDASNRATGIPDRFSGSGSGTDFTLTISRLEPEDFAVYYCQQRSNWPPALTFGGGTKVEIKEPKSSDKTHTCPPCPAPEFEGGPSVFLFPPKPKDTLMISRTPEVTCVVVDVSHEDPEVKFNWYVDGVEVHNAKTKPREEQYNSTYRVVSVLTVLHQDWLNGKEYKCKVSNKALPASIEKTISKAKGQPREPQVYTLPPCRKKLTKNQVSLTCLVKGFYPSDIAVEWESNGQPENNYKTTPPVLKSDGSFFLYSKLTVDKSRWQQGNVFSCSVMHEALHNHYTQKSLSLSPGK

SEQ ID NO: 449 - protein, 482 aa, Artificial Sequence
  Description of Artificial Sequence: Synthetic polypeptide
QVQLQQWGAGLLKPSETLSLTCAVYGGSFSGYYWSWIRQSPEKCLEWIGEINHGGYVTYNPSLESRVTISVDTSKNQFSLKLSSVTAADTAVYYCARDYGPGNYDWYFDLWGRGTLVTVSSGKPGSGKPGSGKPGSGKPGSEIVLTQSPATLSLSPGERATLSCRASQSVSSYLAWYQQKPGQAPRLLIYDASNRATGIPARFSGSGSGTDFTLTISSLEPEDFAVYYCQQRSNWPPALTFGCGTKVEIKEPKSSDKTHTCPPCPAPEFEGGPSVFLFPPKPKDTLMISRTPEVTCVVVDVSHEDPEVKFNWYVDGVEVHNAKTKPREEQYNSTYRVVSVLTVLHQDWLNGKEYKCKVSNKALPASIEKTISKAKGQPREPQVYTLPPCRKKLTKNQVSLTCLVKGFYPSDIAVEWESNGQPENNYKTTPPVLKSDGSFFLYSKLTVDKSRWQQGNVFSCSVMHEALHNHYTQKSLSLSPGK

SEQ ID NO: 450 - protein, 482 aa, Artificial Sequence; identical to SEQ ID NO: 449
  Description of Artificial Sequence: Synthetic polypeptide

SEQ ID NO: 451 - protein, 478 aa, Artificial Sequence
  Description of Artificial Sequence: Synthetic polypeptide
QVQLVQSGAEVKKPGASVKVSCKASGYTFSSYWMHWVRQAPGQRLEWMGEINPGNGHTNYSQKFQGRVTITVDKSASTAYMELSSLRSEDTAVYYCARSFTTARAFAYWGQGTLVTVSSGKPGSGKPGSGKPGSGKPGSDIVMTQSPPTLSLSPGERVTLSCRASQSISDYLHWYQQKPGQSPRLLIKYASQSISGIPARFSGSGSGTDFTLTISSLEPEDFAVYYCQDGHSFPPTFGGGTKVEIKEPKSSDKTHTCPPCPAPEFEGGPSVFLFPPKPKDTLMISRTPEVTCVVVDVSHEDPEVKFNWYVDGVEVHNAKTKPREEQYNSTYRVVSVLTVLHQDWLNGKEYKCKVSNKALPASIEKTISKAKGQPREPQVYTLPPCRKKLTKNQVSLTCLVKGFYPSDIAVEWESNGQPENNYKTTPPVLKSDGSFFLYSKLTVDKSRWQQGNVFSCSVMHEALHNHYTQKSLSLSPGK

SEQ ID NO: 452 - protein, 478 aa, Artificial Sequence
  Description of Artificial Sequence: Synthetic polypeptide
QVQLVQSGAEVKKPGASVKVSCKASGYTFSSYWMHWVRQAPGQRLEWMGEINPGNGHTNYAQKFQGRVTITVDKSASTAYMELSSLRSEDTAVYYCARSFTTARAFAYWGQGTLVTVSSGKPGSGKPGSGKPGSGKPGSDIVMTQSPPTLSLSPGERVTLSCRASQSISDYLHWYQQKPGQSPRLLIKYASQSISGIPARFSGSGSGTDFTLTISSLEPEDFAVYYCQDGHSFPPTFGGGTKVEIKEPKSSDKTHTCPPCPAPEFEGGPSVFLFPPKPKDTLMISRTPEVTCVVVDVSHEDPEVKFNWYVDGVEVHNAKTKPREEQYNSTYRVVSVLTVLHQDWLNGKEYKCKVSNKALPASIEKTISKAKGQPREPQVYTLPPCRKKLTKNQVSLTCLVKGFYPSDIAVEWESNGQPENNYKTTPPVLKSDGSFFLYSKLTVDKSRWQQGNVFSCSVMHEALHNHYTQKSLSLSPGK

SEQ ID NO: 453 - protein, 478 aa, Artificial Sequence
  Description of Artificial Sequence: Synthetic polypeptide
QVQLVQSGAEVKKPGASVKVSCKASGYTFSSYWMHWVRQAPGQRLEWMGEINPGNGHTNYNQKFQGRVTITVDKSASTAYMELSSLRSEDTAVYYCARSFTTARAFAYWGQGTLVTVSSGKPGSGKPGSGKPGSGKPGSDIVMTQSPPTLSLSPGERVTLSCRASQSISDYLHWYQQKPGQSPRLLIKYASQSISGIPARFSGSGSGTDFTLTISSLEPEDFAVYYCQDGHSFPPTFGGGTKVEIKEPKSSDKTHTCPPCPAPEFEGGPSVFLFPPKPKDTLMISRTPEVTCVVVDVSHEDPEVKFNWYVDGVEVHNAKTKPREEQYNSTYRVVSVLTVLHQDWLNGKEYKCKVSNKALPASIEKTISKAKGQPREPQVYTLPPCRKKLTKNQVSLTCLVKGFYPSDIAVEWESNGQPENNYKTTPPVLKSDGSFFLYSKLTVDKSRWQQGNVFSCSVMHEALHNHYTQKSLSLSPGK

SEQ ID NO: 454 - protein, 479 aa, Artificial Sequence
  Description of Artificial Sequence: Synthetic polypeptide
EVQLVESGGGLVQPGGSLRLSCAASGFTFSDYWMSWVRQAPGKGLEWVADIKNDGSYTNYAPSLTNRFTISRDNAKNSLYLQMNSLRAEDTAVYYCARELTGTWGQGTMVTVSSGKPGSGKPGSGKPGSGKPGSDIVMTQSPDSLAVSLGERATINCKSSQSLLSSGNQKNYLAWYQQKPGQPPKLLIYYASTRQSGVPDRFSGSGSGTDFTLTISSLQAEDVAVYYCLQYDRYPFTFGQGTKLEIKEPKSSDKTHTCPPCPAPEFEGGPSVFLFPPKPKDTLMISRTPEVTCVVVDVSHEDPEVKFNWYVDGVEVHNAKTKPREEQYNSTYRVVSVLTVLHQDWLNGKEYKCKVSNKALPASIEKTISKAKGQPREPQVYTLPPCRKKLTKNQVSLTCLVKGFYPSDIAVEWESNGQPENNYKTTPPVLKSDGSFFLYSKLTVDKSRWQQGNVFSCSVMHEALHNHYTQKSLSLSPGK

SEQ ID NO: 455 - protein, 479 aa, Artificial Sequence
  Description of Artificial Sequence: Synthetic polypeptide
EVQLVESGGGLVQPGGSLRLSCAASGFTFSDYWMSWVRQAPGKGLEWVADIKNDGSYTNYVDSVKGRFTISRDNAKNSLYLQMNSLRAEDTAVYYCARELTGTWGQGTLVTVSSGKPGSGKPGSGKPGSGKPGSDIIMTQSPDSLAVSLGERATINCKSSQSLLSSGNQKNYLAWYQQKPGQPPELLIYYASTRQSGVPDRFSGSGSGTDFTLTISSLQAEDVAVYYCLQYDRYPFTFGQGTKLEIKEPKSSDKTHTCPPCPAPEFEGGPSVFLFPPKPKDTLMISRTPEVTCVVVDVSHEDPEVKFNWYVDGVEVHNAKTKPREEQYNSTYRVVSVLTVLHQDWLNGKEYKCKVSNKALPASIEKTISKAKGQPREPQVYTLPPCRKKLTKNQVSLTCLVKGFYPSDIAVEWESNGQPENNYKTTPPVLKSDGSFFLYSKLTVDKSRWQQGNVFSCSVMHEALHNHYTQKSLSLSPGK

SEQ ID NO: 456 - protein, 479 aa, Artificial Sequence
  Description of Artificial Sequence: Synthetic polypeptide
EVQLVESGGGLVQPGGSLRLSCAASGFTFSDYWMSWVRQAPGKGLEWVADIKNDGSYTNYVDSVKGRFTISRDNAKNSLYLQMNSLRAEDTAVYYCARELTGTWGQGTLVTVSSGKPGSGKPGSGKPGSGKPGSDIVMTQSPDSLAVSLGERATINCKSSQSLLSSGNQKNYLAWYQQKPGQPPKLLIYYASTRQSGVPDRFSGSGSGTDFTLTISSLQAEDVAVYYCLQYDRYPFTFGQGTKLEIKEPKSSDKTHTCPPCPAPEFEGGPSVFLFPPKPKDTLMISRTPEVTCVVVDVSHEDPEVKFNWYVDGVEVHNAKTKPREEQYNSTYRVVSVLTVLHQDWLNGKEYKCKVSNKALPASIEKTISKAKGQPREPQVYTLPPCRKKLTKNQVSLTCLVKGFYPSDIAVEWESNGQPENNYKTTPPVLKSDGSFFLYSKLTVDKSRWQQGNVFSCSVMHEALHNHYTQKSLSLSPGK

SEQ ID NO: 457 - protein, 479 aa, Artificial Sequence
  Description of Artificial Sequence: Synthetic polypeptide
EVQLVESGGGLVQPGGSLRLSCAASGFTFSDYWMSWVRQAPGKGMEWVGDIKNDGSYTNYAPSLTNRFTISRDNARNSLYLQMNSLRAEDTAVYYCTRELTGTWGQGTLVTVSSGKPGSGKPGSGKPGSGKPGSDIIMTQSPDSLAVSLGERATINCKSSQSLLSSGNQKNYLAWYQQKPGQPPELLIYYASTRQSGVPDRFSGSGSGTDFTLTISSLQAEDVAVYYCLQYDRYPFTFGQGTKLEIKEPKSSDKTHTCPPCPAPEFEGGPSVFLFPPKPKDTLMISRTPEVTCVVVDVSHEDPEVKFNWYVDGVEVHNAKTKPREEQYNSTYRVVSVLTVLHQDWLNGKEYKCKVSNKALPASIEKTISKAKGQPREPQVYTLPPCRKKLTKNQVSLTCLVKGFYPSDIAVEWESNGQPENNYKTTPPVLKSDGSFFLYSKLTVDKSRWQQGNVFSCSVMHEALHNHYTQKSLSLSPGK

SEQ ID NO: 458 - protein, 479 aa, Artificial Sequence
  Description of Artificial Sequence: Synthetic polypeptide
EVQLVESGGGLVQPGGSLRLSCAASGFTFSDYWMSWVRQAPGKGMEWVGDIKNDGSYTNYAPSLTNRFTISRDNARNSLYLQMNSLRAEDTAVYYCTRELTGTWGQGTLVTVSSGKPGSGKPGSGKPGSGKPGSDIVMTQSPDSLAVSLGERATINCKSSQSLLSSGNQKNYLAWYQQKPGQPPKLLIYYASTRQSGVPDRFSGSGSGTDFTLTISSLQAEDVAVYYCLQYDRYPFTFGQGTKLEIKEPKSSDKTHTCPPCPAPEFEGGPSVFLFPPKPKDTLMISRTPEVTCVVVDVSHEDPEVKFNWYVDGVEVHNAKTKPREEQYNSTYRVVSVLTVLHQDWLNGKEYKCKVSNKALPASIEKTISKAKGQPREPQVYTLPPCRKKLTKNQVSLTCLVKGFYPSDIAVEWESNGQPENNYKTTPPVLKSDGSFFLYSKLTVDKSRWQQGNVFSCSVMHEALHNHYTQKSLSLSPGK

SEQ ID NO: 459 - protein, 478 aa, Artificial Sequence
  Description of Artificial Sequence: Synthetic polypeptide
QVKLVESGAEVKKPGASVKVSCKASGYTFTSYWMHWVRQAPGQVLEWMGEINPGNGHTSYAQKFQGRVTLTVDKSTSTAYMELSSLRSEDTAVYYCARSFTTARAFAYWGQGTTVTVSSGKPGSGKPGSGKPGSGKPGSDIQMTQSPSSLSASVGDRVTITCRASQSISDYLHWYQQKPGKAPKLLIKYASQSISGVPSRFSGSGSGTDFTLTISSLQPEDFATYYCQDSHSFPPTFGGGTKVEIKEPKSSDKTHTCPPCPAPEFEGGPSVFLFPPKPKDTLMISRTPEVTCVVVDVSHEDPEVKFNWYVDGVEVHNAKTKPREEQYNSTYRVVSVLTVLHQDWLNGKEYKCKVSNKALPASIEKTISKAKGQPREPQVYTLPPCRKKLTKNQVSLTCLVKGFYPSDIAVEWESNGQPENNYKTTPPVLKSDGSFFLYSKLTVDKSRWQQGNVFSCSVMHEALHNHYTQKSLSLSPGK

SEQ ID NO: 460 - protein, 478 aa, Artificial Sequence
  Description of Artificial Sequence: Synthetic polypeptide
QVKLVESGAEVKKPGASVKVSCKASGYTFTSYWMHWVRQAPGQVLEWMGEINPGNGHTSYAQKFQGRVTLTVDKSTSTAYMELSSLRSEDTAVYYCARSFTTARAFAYWGQGTTVTVSSGKPGSGKPGSGKPGSGKPGSDIVMTQSPPTLSLSPGERVTLSCRASQSISDYLHWYQQKPGQSPRLLIKYASQSISGIPARFSGSGSGTDFTLTISSLEPEDFAVYYCQDGHSFPPTFGGGTKVEIKEPKSSDKTHTCPPCPAPEFEGGPSVFLFPPKPKDTLMISRTPEVTCVVVDVSHEDPEVKFNWYVDGVEVHNAKTKPREEQYNSTYRVVSVLTVLHQDWLNGKEYKCKVSNKALPASIEKTISKAKGQPREPQVYTLPPCRKKLTKNQVSLTCLVKGFYPSDIAVEWESNGQPENNYKTTPPVLKSDGSFFLYSKLTVDKSRWQQGNVFSCSVMHEALHNHYTQKSLSLSPGK

SEQ ID NO: 461 - protein, 479 aa, Artificial Sequence
  Description of Artificial Sequence: Synthetic polypeptide
QVQLVQSGAEVKKPGASVKLSCKASGYTFSSYWMEIWVRQAPGQGLEWIGEINPGNGHTNYNEKFKSRVTMTRDTSTSTAYMELSSLRSEDTAVYYCARSFKTARAFAYWGQGTLVTVSSGKPGSGKPGSGKPGSGKPGSDIVMTQSPAFLSVTPGEKVTITCRASQTISDYLHWYQQKPDQAPKLLIKYASQSISGIPSRFSGSGSGTDFTFTISSLEAEDAATYYCQDGHSWPPTFGQGTKLEIKEPKSSDKTHTCPPCPAPEFEGGPSVFLFPPKPKDTLMISRTPEVTCVVVDVSHEDPEVKFNWYVDGVEVHNAKTKPREEQYNSTYRVVSVLTVLHQDWLNGKEYKCKVSNKALPASIEKTISKAKGQPREPQVYTLPPCRKKLTKNQVSLTCLVKGFYPSDIAVEWESNGQPENNYKTTPPVLKSDGSFFLYSKLTVDKSRWQQGNVFSCSVMHEALHNHYTQKSLSLSPGK

SEQ ID NO: 462 - protein, 478 aa, Artificial Sequence
  Description of Artificial Sequence: Synthetic polypeptide
QVQLVQSGAEVKKPGASVKVSCKASGYTFTSYWMHWVRQAPGQGLEWMGIINPGNGHTSYAQKFQGRVTMTRDTSTSTVYMELSSLRSEDTAVYYCARSFTTARAFAYWGQGTTVTVSSGKPGSGKPGSGKPGSGKPGSDIQMTQSPSSLSASVGDRVTITCRASQSISDYLHWYQQKPGKAPKLLIKYASQSISGVPSRFSGSGSGTDFTLTISSLQPEDFATYYCQDSHSFPPTFGGGTKVEIKEPKSSDKTHTCPPCPAPEFEGGPSVFLFPPKPKDTLMISRTPEVTCVVVDVSHEDPEVKFNWYVDGVEVHNAKTKPREEQYNSTYRVVSVLTVLHQDWLNGKEYKCKVSNKALPASIEKTISKAKGQPREPQVYTLPPCRKKLTKNQVSLTCLVKGFYPSDIAVEWESNGQPENNYKTTPPVLKSDGSFFLYSKLTVDKSRWQQGNVFSCSVMHEALHNHYTQKSLSLSPGK

SEQ ID NO: 463 - protein, 478 aa, Artificial Sequence
  Description of Artificial Sequence: Synthetic polypeptide
QVQLVQSGAEVKKPGASVKVSCKASGYTFTSYWMHWVRQAPGQGLEWMGIINPGNGHTSYAQKFQGRVTMTRDTSTSTVYMELSSLRSEDTAVYYCARSFTTARAFAYWGQGTTVTVSSGKPGSGKPGSGKPGSGKPGSDIVMTQSPPTLSLSPGERVTLSCRASQSISDYLHWYQQKPGQSPRLLIKYASQSISGIPARFSGSGSGTDFTLTISSLEPEDFAVYYCQDGHSFPPTFGGGTKVEIKEPKSSDKTHTCPPCPAPEFEGGPSVFLFPPKPKDTLMISRTPEVTCVVVDVSHEDPEVKFNWYVDGVEVHNAKTKPREEQYNSTYRVVSVLTVLHQDWLNGKEYKCKVSNKALPASIEKTISKAKGQPREPQVYTLPPCRKKLTKNQVSLTCLVKGFYPSDIAVEWESNGQPENNYKTTPPVLKSDGSFFLYSKLTVDKSRWQQGNVFSCSVMHEALHNHYTQKSLSLSPGK

SEQ ID NO: 464 - protein, 478 aa, Artificial Sequence
  Description of Artificial Sequence: Synthetic polypeptide
QVQLVQSGAEVKKPGASVKVSCKASGYTFTSYWMHWVRQAPGQRLEWMGEINPSNGHTKYSQKFQGRVTITVDKSASTAYMELSSLRSEDTAVYYCARSFTTARAFAYWGQGTLVTVSSGKPGSGKPGSGKPGSGKPGSDIQMTQSPSSLSASVGDRVTITCRASQSISDYLHWYQQKPGKAPKLLIKYASQSISGVPSRFSGSGSGTDFTLTISSLQPEDFATYYCQDSHSFPPTFGGGTKVEIKEPKSSDKTHTCPPCPAPEFEGGPSVFLFPPKPKDTLMISRTPEVTCVVVDVSHEDPEVKFNWYVDGVEVHNAKTKPREEQYNSTYRVVSVLTVLHQDWLNGKEYKCKVSNKALPASIEKTISKAKGQPREPQVYTLPPCRKKLTKNQVSLTCLVKGFYPSDIAVEWESNGQPENNYKTTPPVLKSDGSFFLYSKLTVDKSRWQQGNVFSCSVMHEALHNHYTQKSLSLSPGK

SEQ ID NO: 465 - protein, 478 aa, Artificial Sequence
  Description of Artificial Sequence: Synthetic polypeptide
QVQLVQSGAEVKKPGASVKVSCKASGYTFTSYWMHWVRQAPGQRLEWMGEINPSNGHTKYSQKFQGRVTITVDKSASTAYMELSSLRSEDTAVYYCARSFTTARAFAYWGQGTLVTVSSGKPGSGKPGSGKPGSGKPGSDIVMTQSPPTLSLSPGERVTLSCRASQSISDYLHWYQQKPGQSPRLLIKYASQSISGIPARFSGSGSGTDFTLTISSLEPEDFAVYYCQDGHSFPPTFGGGTKVEIKEPKSSDKTHTCPPCPAPEFEGGPSVFLFPPKPKDTLMISRTPEVTCVVVDVSHEDPEVKFNWYVDGVEVHNAKTKPREEQYNSTYRVVSVLTVLHQDWLNGKEYKCKVSNKALPASIEKTISKAKGQPREPQVYTLPPCRKKLTKNQVSLTCLVKGFYPSDIAVEWESNGQPENNYKTTPPVLKSDGSFFLYSKLTVDKSRWQQGNVFSCSVMHEALHNHYTQKSLSLSPGK

SEQ ID NO: 466 - protein, 481 aa, Artificial Sequence
  Description of Artificial Sequence: Synthetic polypeptide
QVQLVQSGAEVKKPGASVKVSCKASGYTFTDYFMNWVRQAPGQCLEWMGVINPYNDITIYNQKFQGRVTMTVDRSTSTVYMELSSLRSEDTAVYYCAREGVLYDGYYEGAYWGQGTLVTVSSGKPGSGKPGSGKPGSGKPGSDIQLTQSPSFLSASVGDRVTITCKASQNVGIAVAWYQQKPGKAPKLLIYAASNRYTGVPSRFSGSGSGTEFTLTISSLQPEDFATYYCQQYSTYPYTFGCGTKLEIKEPKSSDKTHTCPPCPAPEFEGGPSVFLFPPKPKDTLMISRTPEVTCVVVDVSHEDPEVKFNWYVDGVEVHNAKTKPREEQYNSTYRVVSVLTVLHQDWLNGKEYKCKVSNKALPASIEKTISKAKGQPREPQVYTLPPCRKKLTKNQVSLTCLVKGFYPSDIAVEWESNGQPENNYKTTPPVLKSDGSFFLYSKLTVDKSRWQQGNVFSCSVMHEALHNHYTQKSLSLSPGK

SEQ ID NO: 467 - protein, 482 aa, Artificial Sequence
  Description of Artificial Sequence: Synthetic polypeptide
EVQLLESGGGLVQPGGSLRLSCAASGFTFSSYGMHWVRQAPGKGLEWVAVISHHGSSKYYADSVKGRFTISRDNSKNTLYLQMNSLRAEDTAVYYCARDWFFYLFDYWGQGTLVTVSSGKPGSGKPGSGKPGSGKPGSDIVMTQSPLSLPVTPGEPASISCKSSQSLLHSDGKTFLYWYLQKPGQSPQLLIYEVSNRFSGVPDRFSGSGSGTDFTLKISRVEAEDVGVYYCLQGERLPFTFGQGTKVEIKEPKSSDKTHTCPPCPAPEFEGGPSVFLFPPKPKDTLMISRTPEVTCVVVDVSHEDPEVKFNWYVDGVEVHNAKTKPREEQYNSTYRVVSVLTVLHQDWLNGKEYKCKVSNKALPASIEKTISKAKGQPREPQVYTLPPCRKKLTKNQVSLTCLVKGFYPSDIAVEWESNGQPENNYKTTPPVLKSDGSFFLYSKLTVDKSRWQQGNVFSCSVMHEALHNHYTQKSLSLSPGK

SEQ ID NO: 468 - protein, 728 aa, Artificial Sequence
  Description of Artificial Sequence: Synthetic polypeptide
QVQLVQSGAEVKKPGASVKVSCKASGYTFTDYFMNWVRQAPGQGLEWMGVINPYNDITIYNQKFQGRVTMTVDRSTSTVYMELSSLRSEDTAVYYCAREGVLYDGYYEGAYWGQGTLVTVSSGGGGSGGGGSGGGGSDIQLTQSPSFLSASVGDRVTITCKASQNVGIAVAWYQQKPGKAPKLLIYAASNRYTGVPSRFSGSGSGTEFTLTISSLQPEDFATYYCQQYSTYPYTFGQGTKLEIKSGGGGSQVQLVQSGAEVKKPGASVKVSCKASGYTFSSYWMHWVRQAPGQRLEWMGEINPGNGHTNYSQKFQGRVTITVDKSASTAYMELSSLRSEDTAVYYCARSFTTARAFAYWGQGTLVTVSSGKPGSGKPGSGKPGSGKPGSDIVMTQSPPTLSLSPGERVTLSCRASQSISDYLHWYQQKPGQSPRLLIKYASQSISGIPARFSGSGSGTDFTLTISSLEPEDFAVYYCQDGHSFPPTFGGGTKVEIKEPKSSDKTHTCPPCPAPEFEGGPSVFLFPPKPKDTLMISRTPEVTCVVVDVSHEDPEVKFNWYVDGVEVHNAKTKPREEQYNSTYRVVSVLTVLHQDWLNGKEYKCKVSNKALPASIEKTISKAKGQPREPQVYTLPPCRKKLTKNQVSLTCLVKGFYPSDIAVEWESNGQPENNYKTTPPVLKSDGSFFLYSKLTVDKSRWQQGNVFSCSVMHEALHNHYTQKSLSLSPGK

SEQ ID NO: 469 - protein, 730 aa, Artificial Sequence
  Description of Artificial Sequence: Synthetic polypeptide
QVQLVQSGAEVKKPGASVKVSCKASGYTFSSYWMHWVRQAPGQRLEWMGEINPGNGHTNYSQKFQGRVTITVDKSASTAYMELSSLRSEDTAVYYCARSFTTARAFAYWGQGTLVTVSSGGGGSGGGGSGGGGSGGGGSDIVMTQSPPTLSLSPGERVTLSCRASQSISDYLHWYQQKPGQSPRLLIKYASQSISGIPARFSGSGSGTDFTLTISSLEPEDFAVYYCQDGHSFPPTFGGGTKVEIKSGGGGSQVQLVQSGAEVKKPGASVKVSCKASGYTFSSYWMHWVRQAPGQRLEWMGEINPGNGHTNYSQKFQGRVTITVDKSASTAYMELSSLRSEDTAVYYCARSFTTARAFAYWGQGTLVTVSSGKPGSGKPGSGKPGSGKPGSDIVMTQSPPTLSLSPGERVTLSCRASQSISDYLHWYQQKPGQSPRLLIKYASQSISGIPARFSGSGSGTDFTLTISSLEPEDFAVYYCQDGHSFPPTFGGGTKVEIKEPKSSDKTHTCPPCPAPEFEGGPSVFLFPPKPKDTLMISRTPEVTCVVVDVSHEDPEVKFNWYVDGVEVHNAKTKPREEQYNSTYRVVSVLTVLHQDWLNGKEYKCKVSNKALPASIEKTISKAKGQPREPQVYTLPPCRKKLTKNQVSLTCLVKGFYPSDIAVEWESNGQPENNYKTTPPVLKSDGSFFLYSKLTVDKSRWQQGNVFSCSVMHEALHNHYTQKSLSLSPGK

SEQ ID NO: 470 - protein, 699 aa, Artificial Sequence
  Description of Artificial Sequence: Synthetic polypeptide
QVQLVQSGAEVKKPGASVKVSCKASGYTFSSYWMHWVRQAPGQRLEWMGEINPGNGHTNYSQKFQGRVTITVDKSASTAYMELSSLRSEDTAVYYCARSFTTARAFAYWGQGTLVTVSSASTKGPSVFPLAPSSKSTSGGTAALGCLVKDYFPEPVTVSWNSGALTSGVHTFPAVLQSSGLYSLSSVVTVPSSSLGTQTYICNVNHKPSNTKVDKRVEPKSCDKTHTCPPCPAPEFEGGPSVFLFPPKPKDTLMISRTPEVTCVVVDVSHEDPEVKFNWYVDGVEVHNAKTKPREEQYNSTYRVVSVLTVLHQDWLNGKEYKCKVSNKALPASIEKTISKAKGQPREPQVCTLPPSRDELTKNQVSLTCLVEGFYPSDIAVEWESNGQPENNYKTTPPVLDSDGSFFLYSDLTVDKSRWQQGNVFSCSVMHEALHNHYTQESLSLSPGKSGGGGSQVQLVQSGAEVKKPGASVKVSCKASGYTFTDYFMNWVRQAPGQGLEWMGVINPYNDITIYNQKFQGRVTMTVDRSTSTVYMELSSLRSEDTAVYYCAREGVLYDGYYEGAYWGQGTLVTVSSGGGGSGGGGSGGGGSDIQLTQSPSFLSASVGDRVTITCKASQNVGIAVAWYQQKPGKAPKLLIYAASNRYTGVPSRFSGSGSGTEFTLTISSLQPEDFATYYCQQYSTYPYTFGQGTKLEIK

SEQ ID NO: 471 - protein, 701 aa, Artificial Sequence
  Description of Artificial Sequence: Synthetic polypeptide
QVQLQQWGAGLLKPSETLSLTCAVYGGSFSGYYWSWIRQSPEKGLEWIGEINHGGYVTYNPSLESRVTISVDTSKNQFSLKLSSVTAADTAVYYCARDYGPGNYDWYFDLWGRGTLVTVSSASTKGPSVFPLAPSSKSTSGGTAALGCLVKDYFPEPVTVSWNSGALTSGVHTFPAVLQSSGLYSLSSVVTVPSSSLGTQTYICNVNHKPSNTKVDKRVEPKSCDKTHTCPPCPAPEFEGGPSVFLFPPKPKDTLMISRTPEVTCVVVDVSHEDPEVKFNWYVDGVEVHNAKTKPREEQYNSTYRVVSVLTVLHQDWLNGKEYKCKVSNKALPASIEKTISKAKGQPREPQVYTLPPCRKKLTKNQVSLTCLVKGFYPSDIAVEWESNGQPENNYKTTPPVLKSDGSFFLYSKLTVDKSRWQQGNVFSCSVMHEALHNHYTQKSLSLSPGKSGGGGSQVQLVQSGAEVKKPGASVKVSCKASGYTFTDYFMNWVRQAPGQGLEWMGVINPYNDITIYNQKFQGRVTMTVDRSTSTVYMELSSLRSEDTAVYYCAREGVLYDGYYEGAYWGQGTLVTVSSGGGGSGGGGSGGGGSDIQLTQSPSFLSASVGDRVTITCKASQNVGIAVAWYQQKPGKAPKLLIYAASNRYTGVPSRFSGSGSGTEFTLTISSLQPEDFATYYCQQYSTYPYTFGQGTKLEIK

SEQ ID NO: 472 - protein, 699 aa, Artificial Sequence
  Description of Artificial Sequence: Synthetic polypeptide
QVQLVQSGAEVKKPGASVKVSCKASGYTFSSYWMHWVRQAPGQRLEWMGEINPGNGHTNYSQKFQGRVTITVDKSASTAYMELSSLRSEDTAVYYCARSFTTARAFAYWGQGTLVTVSSASTKGPSVFPLAPSSKSTSGGTAALGCLVKDYFPEPVTVSWNSGALTSGVHTFPAVLQSSGLYSLSSVVTVPSSSLGTQTYICNVNHKPSNTKVDKRVEPKSCDKTHTCPPCPAPEFEGGPSVFLFPPKPKDTLMISRTPEVTCVVVDVSHEDPEVKFNWYVDGVEVHNAKTKPREEQYNSTYRVVSVLTVLHQDWLNGKEYKCKVSNKALPASIEKTISKAKGQPREPQVYTLPPCRKKLTKNQVSLTCLVKGFYPSDIAVEWESNGQPENNYKTTPPVLKSDGSFFLYSKLTVDKSRWQQGNVFSCSVMHEALHNHYTQKSLSLSPGKSGGGGSQVQLVQSGAEVKKPGASVKVSCKASGYTFTDYFMNWVRQAPGQGLEWMGVINPYNDITIYNQKFQGRVTMTVDRSTSTVYMELSSLRSEDTAVYYCAREGVLYDGYYEGAYWGQGTLVTVSSGGGGSGGGGSGGGGSDIQLTQSPSFLSASVGDRVTITCKASQNVGIAVAWYQQKPGKAPKLLIYAASNRYTGVPSRFSGSGSGTEFTLTISSLQPEDFATYYCQQYSTYPYTFGQGTKLEIK

SEQ ID NO: 473 - protein, 701 aa, Artificial Sequence
  Description of Artificial Sequence: Synthetic polypeptide
QVQLQQWGAGLLKPSETLSLTCAVYGGSFSGYYWSWIRQSPEKGLEWIGEINHGGYVTYNPSLESRVTISVDTSKNQFSLKLSSVTAADTAVYYCARDYGPGNYDWYFDLWGRGTLVTVSSASTKGPSVFPLAPSSKSTSGGTAALGCLVKDYFPEPVTVSWNSGALTSGVHTFPAVLQSSGLYSLSSVVTVPSSSLGTQTYICNVNHKPSNTKVDKRVEPKSCDKTHTCPPCPAPEFEGGPSVFLFPPKPKDTLMISRTPEVTCVVVDVSHEDPEVKFNWYVDGVEVHNAKTKPREEQYNSTYRVVSVLTVLHQDWLNGKEYKCKVSNKALPASIEKTISKAKGQPREPQVCTLPPSRDELTKNQVSLTCLVEGFYPSDIAVEWESNGQPENNYKTTPPVLDSDGSFFLYSDLTVDKSRWQQGNVFSCSVMHEALHNHYTQESLSLSPGKSGGGGSQVQLVQSGAEVKKPGASVKVSCKASGYTFTDYFMNWVRQAPGQGLEWMGVINPYNDITIYNQKFQGRVTMTVDRSTSTVYMELSSLRSEDTAVYYCAREGVLYDGYYEGAYWGQGTLVTVSSGGGGSGGGGSGGGGSDIQLTQSPSFLSASVGDRVTITCKASQNVGIAVAWYQQKPGKAPKLLIYAASNRYTGVPSRFSGSGSGTEFTLTISSLQPEDFATYYCQQYSTYPYTFGQGTKLEIK

SEQ ID NO: 474 - protein, 474 aa, Artificial Sequence
  Description of Artificial Sequence: Synthetic polypeptide
EVQLVQSGAEVKKPGESLKISCKGSGYEFSSHWMNWVRQMPGKCLEWMGQIYPGDGDINYNEKFRGQVTISADKSISTAYLQWSSLKASDTAMYYCARHGNYVMDYWGQGTLVTVSSGKPGSGKPGSGKPGSGKPGSIQLTQSPSFLSASVGDRVTITCSASSSVSYMFWYQQKPGKAPKPWIYRTSNLASGVPSRFSGSGSGTEFTLTISSLQPEDFATYYCQQFHDYPRTFGCGTKVEIKEPKSSDKTHTCPPCPAPEFEGGPSVFLFPPKPKDTLMISRTPEVTCVVVDVSHEDPEVKFNWYVDGVEVHNAKTKPREEQYNSTYRVVSVLTVLHQDWLNGKEYKCKVSNKALPASIEKTISKAKGQPREPQVYTLPPCRKKLTKNQVSLTCLVKGFYPSDIAVEWESNGQPENNYKTTPPVLKSDGSFFLYSKLTVDKSRWQQGNVFSCSVMHEALHNHYTQKSLSLSPGK

SEQ ID NO: 475 - protein, 486 aa, Artificial Sequence
  Description of Artificial Sequence: Synthetic polypeptide
QVQLVQSGAEVKKPGASVKVSCKASGYTFTNFGITWVRQAPGQGLEWMGEIYPSSGNTFYNEKFKGRVTMTTDTSTSTAYMELRSLRSDDTAVYYCARGGGPLRSRYFDYWGQGTLVTVSSGKPGSGKPGSGKPGSGKPGSDIVMTQSPDSLAVSLGERATINCRSSQSLFSSGNQKNYLTWYQQKPGQPPKLLIYWASTRESGVPDRFSGSGSGTDFTLTISSLQAEDVAVYYCQNDYYYPLTFGGGTKVEIKEPKSSDKTHTCPPCPAPEFEGGPSVFLFPPKPKDTLMISRTPEVTCVVVDVSHEDPEVKFNWYVDGVEVHNAKTKPREEQYNSTYRVVSVLTVLHQDWLNGKEYKCKVSNKALPASIEKTISKAKGQPREPQVYTLPPCRKKLTKNQVSLTCLVKGFYPSDIAVEWESNGQPENNYKTTPPVLKSDGSFFLYSKLTVDKSRWQQGNVFSCSVMHEALHNHYTQKSLSLSPGK

SEQ ID NO: 476 - protein, 483 aa, Artificial Sequence
  Description of Artificial Sequence: Synthetic polypeptide
EVQLVESGGGLVQPGGSLRLSCAASGFTFSSFGMHWVRQAPGKGLEWVSYISSGNSAIYYADTVNGRFTISRDNAKNSLYLQMNSLRAEDTAVYYCARLRYGNSFDYWGQGTLVTVSSGKPGSGKPGSGKPGSGKPGSDIVMTQSPDSLAVSLGERATINCKSSQSLLNSGNQKNYLTWYQQKPGQPPKLLIYWASTRESGVPDRFSGSGSGTDFTLTISSLQAEDVAVYYCQNNYYYPLTFGGGTKVEIKEPKSSDKTHTCPPCPAPEFEGGPSVFLFPPKPKDTLMISRTPEVTCVVVDVSHEDPEVKFNWYVDGVEVHNAKTKPREEQYNSTYRVVSVLTVLHQDWLNGKEYKCKVSNKALPASIEKTISKAKGQPREPQVYTLPPCRKKLTKNQVSLTCLVKGFYPSDIAVEWESNGQPENNYKTTPPVLKSDGSFFLYSKLTVDKSRWQQGNVFSCSVMHEALHNHYTQKSLSLSPGK

SEQ ID NO: 477 - protein, 484 aa, Artificial Sequence
  Description of Artificial Sequence: Synthetic polypeptide
QVQLVQSGAEVKKPGSSVKVSCKASGYAFNNYWMNWVRQAPGQGLEWMGQISPGNGNSNFNGKFKGRVTITADKSTSTAYMELSSLRSEDTAVYYCARGGRYGNAMDYWGQGTTVTVSSGKPGSGKPGSGKPGSGKPGSDIVMTQSPDSLAVSLGERATINCKSSQSLLNSGNQRNYLTWYQQKPGQPPKLLIYWASTRESGVPDRFSGSGSGTDFTLTISSLQAEDVAVYYCQNAYFYPYTFGGGTKVEIKEPKSSDKTHTCPPCPAPEFEGGPSVFLFPPKPKDTLMISRTPEVTCVVVDVSHEDPEVKFNWYVDGVEVHNAKTKPREEQYNSTYRVVSVLTVLHQDWLNGKEYKCKVSNKALPASIEKTISKAKGQPREPQVYTLPPCRKKLTKNQVSLTCLVKGFYPSDIAVEWESNGQPENNYKTTPPVLKSDGSFFLYSKLTVDKSRWQQGNVFSCSVMHEALHNHYTQKSLSLSPGK

SEQ ID NO: 478 - protein, 483 aa, Artificial Sequence
  Description of Artificial Sequence: Synthetic polypeptide
QVQLVQSGAEVKKPGASVKVSCKASGYTFTNSGMNWVRQAPGQGLEWMGWINTNTGEPTFAEEFRGRVTMTRDTSISTAYMELSRLRSDDTAVYYCARYYYGNSFAYWGQGTLVTVSSGKPGSGKPGSGKPGSGKPGSDIVMTQSPDSLAVSLGERATINCKSSQSLLNSGNQKNYLTWYQQKPGQPPKLLIYWASTRESGVPDRFSGSGSGTDFTLTISSLQAEDVAVYYCQNNYFYPLTFGGGTKVEIKEPKSSDKTHTCPPCPAPEFEGGPSVFLFPPKPKDTLMISRTPEVTCVVVDVSHEDPEVKFNWYVDGVEVHNAKTKPREEQYNSTYRVVSVLTVLHQDWLNGKEYKCKVSNKALPASIEKTISKAKGQPREPQVYTLPPCRKKLTKNQVSLTCLVKGFYPSDIAVEWESNGQPENNYKTTPPVLKSDGSFFLYSKLTVDKSRWQQGNVFSCSVMHEALHNHYTQKSLSLSPGK

SEQ ID NO: 479 - protein, 478 aa, Artificial Sequence; identical to SEQ ID NO: 462
  Description of Artificial Sequence: Synthetic polypeptide

SEQ ID NO: 480 - protein, 739 aa, Artificial Sequence
  Description of Artificial Sequence: Synthetic polypeptide
EVQLVESGGGLVQPGGSLRLSCAASGFTFSTYAMNWVRQAPGKGLEWVGRIRSKYNNYATYYADSVKGRFTISRDDSKNTLYLQMNSLRAEDTAVYYCVRHGNFGDSYVSWFEYWGQGTLVTVSSGGGGSGGGGSGGGGSGGGGSQAVVTQEPSLTVSPGGTVTLTCGSSTGAVTTSNYANWVQQKPGKSPRGLIGGTNKRAPGVPARFSGSLLGGKAALTISGAQPEDEADYYCALWYSNHWVFGGGTKLTVLSGGGGSQVQLVQSGAEVKKPGASVKVSCKASGYTFTSYYIHWVRQAPGQGLEWIGSIYPGNVNTNYNEKFKDRATLTVDTSISTAYMELSRLRSDDTAVYFCTRSHYGLDWNFDVWGQGTTVTVSSGKPGSGKPGSGKPGSGKPGSDIQMTQSPSSLSASVGDRVTITCHASQNIYVWLNWYQQKPGKAPKLLIYKASNLHTGVPSRFSGSGSGTDFTLTISSLQPEDFATYYCQQGQTYPYTFGGGTKVEIKEPKSSDKTHTCPPCPAPEFEGGPSVFLFPPKPKDTLMISRTPEVTCVVVDVSHEDPEVKFNWYVDGVEVHNAKTKPREEQYNSTYRVVSVLTVLHQDWLNGKEYKCKVSNKALPASIEKTISKAKGQPREPQVYTLPPCRKKLTKNQVSLTCLVKGFYPSDIAVEWESNGQPENNYKTTPPVLKSDGSFFLYSKLTVDKSRWQQGNVFSCSVMHEALHNHYTQKSLSLSPGK

SEQ ID NO: 481 - protein, 739 aa, Artificial Sequence
  Description of Artificial Sequence: Synthetic polypeptide
QVQLVQSGAEVKKPGASVKVSCKASGYTFTSYYIHWVRQAPGQGLEWIGSIYPGNVNTNYNEKFKDRATLTVDTSISTAYMELSRLRSDDTAVYFCTRSHYGLDWNFDVWGQGTTVTVSSGKPGSGKPGSGKPGSGKPGSDIQMTQSPSSLSASVGDRVTITCHASQNIYVWLNWYQQKPGKAPKLLIYKASNLHTGVPSRFSGSGSGTDFTLTISSLQPEDFATYYCQQGQTYPYTFGGGTKVEIKSGGGGSEVQLVESGGGLVQPGGSLRLSCAASGFTFSTYAMNWVRQAPGKGLEWVGRIRSKYNNYATYYADSVKGRFTISRDDSKNTLYLQMNSLRAEDTAVYYCVRHGNFGDSYVSWFEYWGQGTLVTVSSGGGGSGGGGSGGGGSGGGGSQAVVTQEPSLTVSPGGTVTLTCGSSTGAVTTSNYANWVQQKPGKSPRGLIGGTNKRAPGVPARFSGSLLGGKAALTISGAQPEDEADYYCALWYSNHWVFGGGTKLTVLEPKSSDKTHTCPPCPAPEFEGGPSVFLFPPKPKDTLMISRTPEVTCVVVDVSHEDPEVKFNWYVDGVEVHNAKTKPREEQYNSTYRVVSVLTVLHQDWLNGKEYKCKVSNKALPASIEKTISKAKGQPREPQVYTLPPCRKKLTKNQVSLTCLVKGFYPSDIAVEWESNGQPENNYKTTPPVLKSDGSFFLYSKLTVDKSRWQQGNVFSCSVMHEALHNHYTQKSLSLSPGK

SEQ ID NO: 482 - protein, 451 aa, Artificial Sequence
  Description of Artificial Sequence: Synthetic polypeptide
DVQLQESGPGLVKPSQSLSLTCTVTGYSITSDYAWNWIRQFPGNKLEWMGYIRYSGSTSYNPSLKSRISITRDTSKNQFFLQLNSVTTEDTATYYCARDWPRPSYWYFDVWGAGTTVTVSSASTKGPSVFPLAPSSKSTSGGTAALGCLVKDYFPEPVTVSWNSGALTSGVHTFPAVLQSSGLYSLSSVVTVPSSSLGTQTYICNVNHKPSNTKVDKRVEPKSCDKTHTCPPCPAPEFEGGPSVFLFPPKPKDTLMISRTPEVTCVVVDVSHEDPEVKFNWYVDGVEVHNAKTKPREEQYNSTYRVVSVLTVLHQDWLNGKEYKCKVSNKALPASIEKTISKAKGQPREPQVCTLPPSRDELTKNQVSLTCLVEGFYPSDIAVEWESNGQPENNYKTTPPVLDSDGSFFLYSDLTVDKSRWQQGNVFSCSVMHEALHNHYTQESLSLSPGK

SEQ ID NO: 483 - protein, 214 aa, Artificial Sequence
  Description of Artificial Sequence: Synthetic polypeptide
DIQTTQTTSSLSASLGDRVTISCRAGQDISNYLNWYQQKPDGTVKLLIYYTSRLHSGVPSRFSGSGSGTDYSLTISNLEQEDIATYFCQQGHTLPWTFGGGTKLEIKRTVAAPSVFIFPPSDEQLKSGTASVVCLLNNFYPREAKVQWKVDNALQSGNSQESVTEQDSKDSTYSLSSTLTLSKADYEKHKVYACEVTHQGLSSPVTKSFNRGEC

SEQ ID NO: 484 - protein, 739 aa, Artificial Sequence
  Description of Artificial Sequence: Synthetic polypeptide
EVQLVESGGGLVQPGGSLRLSCAASGFTFSDYWMSWVRQAPGKGLEWVADIKNDGSYTNYAPSLTNRFTISRDNAKNSLYLQMNSLRAEDTAVYYCARELTGTWGQGTMVTVSSGGGGSGGGGSGGGGSGGGGSDIVMTQSPDSLAVSLGERATINCKSSQSLLSSGNQKNYLAWYQQKPGQPPKLLIYYASTRQSGVPDRFSGSGSGTDFTLTISSLQAEDVAVYYCLQYDRYPFTFGQGTKLEIKSGGGGSEVQLVESGGGLVQPGGSLRLSCAASGFTFSTYAMNWVRQAPGKGLEWVGRIRSKYNNYATYYADSVKGRFTISRDDSKNTLYLQMNSLRAEDTAVYYCVRHGNFGDSYVSWFEYWGQGTLVTVSSGKPGSGKPGSGKPGSGKPGSQAVVTQEPSLTVSPGGTVTLTCGSSTGAVTTSNYANWVQQKPGKSPRGLIGGTNKRAPGVPARFSGSLLGGKAALTISGAQPEDEADYYCALWYSNHWVFGGGTKLTVLEPKSSDKTHTCPPCPAPEFEGGPSVFLFPPKPKDTLMISRTPEVTCVVVDVSHEDPEVKFNWYVDGVEVHNAKTKPREEQYNSTYRVVSVLTVLHQDWLNGKEYKCKVSNKALPASIEKTISKAKGQPREPQVYTLPPCRKKLTKNQVSLTCLVKGFYPSDIAVEWESNGQPENNYKTTPPVLKSDGSFFLYSKLTVDKSRWQQGNVFSCSVMHEALHNHYTQKSLSLSPGK

SEQ ID NO: 485 - protein, 711 aa, Artificial Sequence
  Description of Artificial Sequence: Synthetic polypeptide
QVQLQQWGAGLLKPSETLSLTCAVYGGSFSGYYWSWIRQSPEKGLEWIGEINHGGYVTYNPSLESRVTISVDTSKNQFSLKLSSVTAADTAVYYCARNYGPGNYDWYFDLWGRGTLVTVSSASTKGPSVFPLAPSSKSTSGGTAALGCLVKDYFPEPVTVSWNSGALTSGVHTFPAVLQSSGLYSLSSVVTVPSSSLGTQTYICNVNHKPSNTKVDKRVEPKSCDKTHTCPPCPAPEFEGGPSVFLFPPKPKDTLMISRTPEVTCVVVDVSHEDPEVKFNWYVDGVEVHNAKTKPREEQYNSTYRVVSVLTVLHQDWLNGKEYKCKVSNKALPASIEKTISKAKGQPREPQVYTLPPCRKKLTKNQVSLTCLVKGFYPSDIAVEWESNGQPENNYKTTPPVLKSDGSFFLYSKLTVDKSRWQQGNVFSCSVMHEALHNHYTQKSLSLSPGKSGGGGSEVQLVESGGGLVQPGGSLRLSCAASGFTFSTYAMNWVRQAPGKGLEWVGRIRSKYNNYATYYADSVKGRFTISRDDSKNTLYLQMNSLRAEDTAVYYCVRHGNFGDSYVSWFEYWGQGTLVTVSSGGGGSGGGGSGGGGSGGGGSQAVVTQEPSLTVSPGGTVTLTCGSSTGAVTTSNYANWVQQKPGKSPRGLIGGTNKRAPGVPARFSGSLLGGKAALTISGAQPEDEADYYCALWYSNHWVFGGGTKLTVL

SEQ ID NO: 486 - protein, 738 aa, Artificial Sequence
  Description of Artificial Sequence: Synthetic polypeptide
QVQLVQSGAEVKKPGASVKVSCKASGYTFSSYWMHWVRQAPGQRLEWMGEINPGNGHTNYSQKFQGRVTITVDKSASTAYMELSSLRSEDTAVYYCARSFTTARAFAYWGQGTLVTVSSGGGGSGGGGSGGGGSGGGGSDIVMTQSPPTLSLSPGERVTLSCRASQSISDYLHWYQQKPGQSPRLLIKYASQSISGIPARFSGSGSGTDFTLTISSLEPEDFAVYYCQDGHSFPPTFGGGTKVEIKSGGGGSEVQLVESGGGLVQPGGSLRLSCAASGFTFSTYAMNWVRQAPGKGLEWVGRIRSKYNNYATYYADSVKGRFTISRDDSKNTLYLQMNSLRAEDTAVYYCVRHGNFGDSYVSWFEYWGQGTLVTVSSGKPGSGKPGSGKPGSGKPGSQAVVTQEPSLTVSPGGTVTLTCGSSTGAVTTSNYANWVQQKPGKSPRGLIGGTNKRAPGVPARFSGSLLGGKAALTISGAQPEDEADYYCALWYSNHWVFGGGTKLTVLEPKSSDKTHTCPPCPAPEFEGGPSVFLFPPKPKDTLMISRTPEVTCVVVDVSHEDPEVKFNWYVDGVEVHNAKTKPREEQYNSTYRVVSVLTVLHQDWLNGKEYKCKVSNKALPASIEKTISKAKGQPREPQVYTLPPCRKKLTKNQVSLTCLVKGFYPSDIAVEWESNGQPENNYKTTPPVLKSDGSFFLYSKLTVDKSRWQQGNVFSCSVMHEALHNHYTQKSLSLSPGK

SEQ ID NO: 487 - protein, 711 aa, Artificial Sequence
  Description of Artificial Sequence: Synthetic polypeptide
QVQLQQWGAGLLKPSETLSLTCAVYGGSFSGYYWSWIRQSPEKGLEWIGEINHGGYVTYNPSLESRVTISVDTSKNQFSLKLSSVTAADTAVYYCARDYGPGNYDWYFDLWGRGTLVTVSSASTKGPSVFPLAPSSKSTSGGTAALGCLVKDYFPEPVTVSWNSGALTSGVHTFPAVLQSSGLYSLSSVVTVPSSSLGTQTYICNVNHKPSNTKVDKRVEPKSCDKTHTCPPCPAPEFEGGPSVFLFPPKPKDTLMISRTPEVTCVVVDVSHEDPEVKFNWYVDGVEVHNAKTKPREEQYNSTYRVVSVLTVLHQDWLNGKEYKCKVSNKALPASIEKTISKAKGQPREPQVYTLPPCRKKLTKNQVSLTCLVKGFYPSDIAVEWESNGQPENNYKTTPPVLKSDGSFFLYSKLTVDKSRWQQGNVFSCSVMHEALHNHYTQKSLSLSPGKSGGGGSEVQLVESGGGLVQPGGSLRLSCAASGFTFSTYAMNWVRQAPGKGLEWVGRIRSKYNNYATYYADSVKGRFTISRDDSKNTLYLQMNSLRAEDTAVYYCVRHGNFGDSYVSWFEYWGQGTLVTVSSGGGGSGGGGSGGGGSGGGGSQAVVTQEPSLTVSPGGTVTLTCGSSTGAVTTSNYANWVQQKPGKSPRGLIGGTNKRAPGVPARFSGSLLGGKAALTISGAQPEDEADYYCALWYSNHWVFGGGTKLTVL

SEQ ID NO: 488 - protein, 483 aa, Artificial Sequence
  Description of Artificial Sequence: Synthetic polypeptide
EPKSSDKTHTCPPCPAPEFEGGPSVFLFPPKPKDTLMISRTPEVTCVVVDVSHEDPEVKFNWYVDGVEVHNAKTKPREEQYNSTYRVVSVLTVLHQDWLNGKEYKCKVSNKALPASIEKTISKAKGQPREPQVCTLPPSRDELTKNQVSLTCLVEGFYPSDIAVEWESNGQPENNYKTTPPVLDSDGSFFLYSDLTVDKSRWQQGNVFSCSVMHEALHNHYTQESLSLSPGKSGGGSQVQLVQSGAEVKKPGASVKVSCKASGYTFSSYWMHWVRQAPGQRLEWMGEINPGNGHTNYSQKFQGRVTITVDKSASTAYMELSSLRSEDTAVYYCARSFTTARAFAYWGQGTLVTVSSGKPGSGKPGSGKPGSGKPGSDIVMTQSPPTLSLSPGERVTLSCRASQSISDYLHWYQQKPGQSPRLLIKYASQSISGIPARFSGSGSGTDFTLTISSLEPEDFAVYYCQDGHSFPPTFGGGTKVEIK

SEQ ID NO: 489 - protein, 734 aa, Artificial Sequence
  Description of Artificial Sequence: Synthetic polypeptide
EPKSSDKTHTCPPCPAPEFEGGPSVFLFPPKPKDTLMISRTPEVTCVVVDVSHEDPEVKFNWYVDGVEVHNAKTKPREEQYNSTYRVVSVLTVLHQDWLNGKEYKCKVSNKALPASIEKTISKAKGQPREPQVCTLPPSRDELTKNQVSLTCLVEGFYPSDIAVEWESNGQPENNYKTTPPVLDSDGSFFLYSDLTVDKSRWQQGNVFSCSVMHEALHNHYTQESLSLSPGKSGGGSQVQLVQSGAEVKKPGASVKVSCKASGYTFSSYWMHWVRQAPGQRLEWMGEINPGNGHTNYSQKFQGRVTITVDKSASTAYMELSSLRSEDTAVYYCARSFTTARAFAYWGQGTLVTVSSGKPGSGKPGSGKPGSGKPGSDIVMTQSPPTLSLSPGERVTLSCRASQSISDYLHWYQQKPGQSPRLLIKYASQSISGIPARFSGSGSGTDFTLTISSLEPEDFAVYYCQDGHSFPPTFGGGTKVEIKSGGGSQVQLVQSGAEVKKPGASVKVSCKASGYTFSSYWMHWVRQAPGQRLEWMGEINPGNGHTNYSQKFQGRVTITVDKSASTAYMELSSLRSEDTAVYYCARSFTTARAFAYWGQGTLVTVSSGKPGSGKPGSGKPGSGKPGSDIVMTQSPPTLSLSPGERVTLSCRASQSISDYLHWYQQKPGQSPRLLIKYASQSISGIPARFSGSGSGTDFTLTISSLEPEDFAVYYCQDGHSFPPTFGGGTKVEIK

SEQ ID NO: 490 - protein, 739 aa, Artificial Sequence
  Description of Artificial Sequence: Synthetic polypeptide
EVQLVESGGGLVQPGGSLRLSCAASGFTFSTYAMNWVRQAPGKGLEWVGRIRSKYNNYATYYADSVKGRFTISRDDSKNTLYLQMNSLRAEDTAVYYCVRHGNFGDSYVSWFEYWGQGTLVTVSSGGGGSGGGGSGGGGSGGGGSQAVVTQEPSLTVSPGGTVTLTCGSSTGAVTTSNYANWVQQKPGKSPRGLIGGTNKRAPGVPARFSGSLLGGKAALTISGAQPEDEADYYCALWYSNHWVFGGGTKLTVLSGGGGSEVQLVESGGGLVQPGGSLRLSCAASGFTFSDYWMSWVRQAPGKGLEWVADIKNDGSYTNYAPSLTNRFTISRDNAKNSLYLQMNSLRAEDTAVYYCARELTGTWGQGTMVTVSSGKPGSGKPGSGKPGSGKPGSDIVMTQSPDSLAVSLGERATINCKSSQSLLSSGNQKNYLAWYQQKPGQPPKLLIYYASTRQSGVPDRFSGSGSGTDFTLTISSLQAEDVAVYYCLQYDRYPFTFGQGTKLEIKEPKSSDKTHTCPPCPAPEFEGGPSVFLFPPKPKDTLMISRTPEVTCVVVDVSHEDPEVKFNWYVDGVEVHNAKTKPREEQYNSTYRVVSVLTVLHQDWLNGKEYKCKVSNKALPASIEKTISKAKGQPREPQVYTLPPCRKKLTKNQVSLTCLVKGFYPSDIAVEWESNGQPENNYKTTPPVLKSDGSFFLYSKLTVDKSRWQQGNVFSCSVMHEALHNHYTQKSLSLSPGK

SEQ ID NO: 491 - protein, 738 aa, Artificial Sequence
  Description of Artificial Sequence: Synthetic polypeptide
EVQLVESGGGLVQPGGSLRLSCAASGFTFSTYAMNWVRQAPGKGLEWVGRIRSKYNNYATYYADSVKGRFTISRDDSKNTLYLQMNSLRAEDTAVYYCVRHGNFGDSYVSWFEYWGQGTLVTVSSGGGGSGGGGSGGGGSGGGGSQAVVTQEPSLTVSPGGTVTLTCGSSTGAVTTSNYANWVQQKPGKSPRGLIGGTNKRAPGVPARFSGSLLGGKAALTISGAQPEDEADYYCALWYSNHWVFGGGTKLTVLSGGGGSQVQLVQSGAEVKKPGASVKVSCKASGYTFSSYWMHWVRQAPGQRLEWMGEINPGNGHTNYSQKFQGRVTITVDKSASTAYMELSSLRSEDTAVYYCARSFTTARAFAYWGQGTLVTVSSGKPGSGKPGSGKPGSGKPGSDIVMTQSPPTLSLSPGERVTLSCRASQSISDYLHWYQQKPGQSPRLLIKYASQSISGIPARFSGSGSGTDFTLTISSLEPEDFAVYYCQDGHSFPPTFGGGTKVEIKEPKSSDKTHTCPPCPAPEFEGGPSVFLFPPKPKDTLMISRTPEVTCVVVDVSHEDPEVKFNWYVDGVEVHNAKTKPREEQYNSTYRVVSVLTVLHQDWLNGKEYKCKVSNKALPASIEKTISKAKGQPREPQVYTLPPCRKKLTKNQVSLTCLVKGFYPSDIAVEWESNGQPENNYKTTPPVLKSDGSFFLYSKLTVDKSRWQQGNVFSCSVMHEALHNHYTQKSLSLSPGK

SEQ ID NO: 492 - protein, 746 aa, Artificial Sequence
  Description of Artificial Sequence: Synthetic polypeptide
QVQLVQSGAEVKKPGASVKVSCKASGYTFTNFGITWVRQAPGQGLEWMGEIYPSSGNTFYNEKFKGRVTMTTDTSTSTAYMELRSLRSDDTAVYYCARGGGPLRSRYFDYWGQGTLVTVSSGGGGSGGGGSGGGGSGGGGSDIVMTQSPDSLAVSLGERATINCRSSQSLFSSGNQKNYLTWYQQKPGQPPKLLIYWASTRESGVPDRFSGSGSGTDFTLTISSLQAEDVAVYYCQNDYYYPLTFGGGTKVEIKSGGGGSEVQLVESGGGLVQPGGSLRLSCAASGFTFSTYAMNWVRQAPGKGLEWVGRIRSKYNNYATYYADSVKGRFTISRDDSKNTLYLQMNSLRAEDTAVYYCVRHGNFGDSYVSWFEYWGQGTLVTVSSGKPGSGKPGSGKPGSGKPGSQAVVTQEPSLTVSPGGTVTLTCGSSTGAVTTSNYANWVQQKPGKSPRGLIGGTNKRAPGVPARFSGSLLGGKAALTISGAQPEDEADYYCALWYSNHWVFGGGTKLTVLEPKSSDKTHTCPPCPAPEFEGGPSVFLFPPKPKDTLMISRTPEVTCVVVDVSHEDPEVKFNWYVDGVEVHNAKTKPREEQYNSTYRVVSVLTVLHQDWLNGKEYKCKVSNKALPASIEKTISKAKGQPREPQVYTLPPCRKKLTKNQVSLTCLVKGFYPSDIAVEWESNGQPENNYKTTPPVLKSDGSFFLYSKLTVDKSRWQQGNVFSCSVMHEALHNHYTQKSLSLSPGK

SEQ ID NO: 493 - protein, 743 aa, Artificial Sequence
  Description of Artificial Sequence: Synthetic polypeptide
QVQLVQSGAEVKKPGASVKVSCKASGYTFTNSGMNWVRQAPGQGLEWMGWINTNTGEPTFAEEFRGRVTMTRDTSISTAYMELSRLRSDDTAVYYCARYYYGNSFAYWGQGTLVTVSSGGGGSGGGGSGGGGSGGGGSDIVMTQSPDSLAVSLGERATINCKSSQSLLNSGNQKNYLTWYQQKPGQPPKLLIYWASTRESGVPDRFSGSGSGTDFTLTISSLQAEDVAVYYCQNNYFYPLTFGGGTKVEIKSGGGGSEVQLVESGGGLVQPGGSLRLSCAASGFTFSTYAMNWVRQAPGKGLEWVGRIRSKYNNYATYYADSVKGRFTISRDDSKNTLYLQMNSLRAEDTAVYYCVRHGNFGDSYVSWFEYWGQGTLVTVSSGKPGSGKPGSGKPGSGKPGSQAVVTQEPSLTVSPGGTVTLTCGSSTGAVTTSNYANWVQQKPGKSPRGLIGGTNKRAPGVPARFSGSLLGGKAALTISGAQPEDEADYYCALWYSNHWVFGGGTKLTVLEPKSSDKTHTCPPCPAPEFEGGPSVFLFPPKPKDTLMISRTPEVTCVVVDVSHEDPEVKFNWYVDGVEVHNAKTKPREEQYNSTYRVVSVLTVLHQDWLNGKEYKCKVSNKALPASIEKTISKAKGQPREPQVYTLPPCRKKLTKNQVSLTCLVKGFYPSDIAVEWESNGQPENNYKTTPPVLKSDGSFFLYSKLTVDKSRWQQGNVFSCSVMHEALHNHYTQKSLSLSPGK

SEQ ID NO: 494 - protein, 961 aa, Artificial Sequence
  Description of Artificial Sequence: Synthetic polypeptide
QVQLQQWGAGLLKPSETLSLTCAVYGGSFSGYYWSWIRQSPEKGLEWIGEINHGGYVTYNPSLESRVTISVDTSKNQFSLKLSSVTAADTAVYYCARDYGPGNYDWYFDLWGRGTLVTVSSASTKGPSVFPLAPSSKSTSGGTAALGCLVKDYFPEPVTVSWNSGALTSGVHTFPAVLQSSGLYSLSSVVTVPSSSLGTQTYICNVNHKPSNTKVDKRVEPKSCDKTHTCPPCPAPEFEGGPSVFLFPPKPKDTLMISRTPEVTCVVVDVSHEDPEVKFNWYVDGVEVHNAKTKPREEQYNSTYRVVSVLTVLHQDWLNGKEYKCKVSNKALPASIEKTISKAKGQPREPQVYTLPPCRKKLTKNQVSLTCLVKGFYPSDIAVEWESNGQPENNYKTTPPVLKSDGSFFLYSKLTVDKSRWQQGNVFSCSVMHEALHNHYTQKSLSLSPGKSGGGGSEVQLVESGGGLVQPGGSLRLSCAASGFTFSTYAMNWVRQAPGKGLEWVGRIRSKYNNYATYYADSVKGRFTISRDDSKNTLYLQMNSLRAEDTAVYYCVRHGNFGDSYVSWFEYWGQGTLVTVSSGGGGSGGGGSGGGGSGGGGSQAVVTQEPSLTVSPGGTVTLTCGSSTGAVTTSNYANWVQQKPGKSPRGLIGGTNKRAPGVPARFSGSLLGGKAALTISGAQPEDEADYYCALWYSNHWVFGGGTKLTVLSGGGGSQVQLVQSGAEVKKPGASVKVSCKASGYTFTDYFMNWVRQAPGQGLEWMGVINPYNDITIYNQKFQGRVTMTVDRSTSTVYMELSSLRSEDTAVYYCAREGVLYDGYYEGAYWGQGTLVTVSSGGGGSGGGGSGGGGSDIQLTQSPSFLSASVGDRVTITCKASQNVGIAVAWYQQKPGKAPKLLIYAASNRYTGVPSRFSGSGSGTEFTLTISSLQPEDFATYYCQQYSTYPYTFGQGTKLEIK

SEQ ID NO: 495 - protein, 709 aa, Artificial Sequence
  Description of Artificial Sequence: Synthetic polypeptide
QVQLVQSGAEVKKPGASVKVSCKASGYTFSSYWMHWVRQAPGQRLEWMGEINPGNGHTNYSQKFQGRVTITVDKSASTAYMELSSLRSEDTAVYYCARSFTTARAFAYWGQGTLVTVSSASTKGPSVFPLAPSSKSTSGGTAALGCLVKDYFPEPVTVSWNSGALTSGVHTFPAVLQSSGLYSLSSVVTVPSSSLGTQTYICNVNHKPSNTKVDKRVEPKSCDKTHTCPPCPAPEFEGGPSVFLFPPKPKDTLMISRTPEVTCVVVDVSHEDPEVKFNWYVDGVEVHNAKTKPREEQYNSTYRVVSVLTVLHQDWLNGKEYKCKVSNKALPASIEKTISKAKGQPREPQVCTLPPSRDELTKNQVSLTCLVEGFYPSDIAVEWESNGQPENNYKTTPPVLDSDGSFFLYSDLTVDKSRWQQGNVFSCSVMHEALHNHYTQESLSLSPGKSGGGGSEVQLVESGGGLVQPGGSLRLSCAASGFTFSTYAMNWVRQAPGKGLEWVGRIRSKYNNYATYYADSVKGRFTISRDDSKNTLYLQMNSLRAEDTAVYYCVRHGNFGDSYVSWFEYWGQGTLVTVSSGGGGSGGGGSGGGGSGGGGSQAVVTQEPSLTVSPGGTVTLTCGSSTGAVTTSNYANWVQQKPGKSPRGLIGGTNKRAPGVPARFSGSLLGGKAALTISGAQPEDEADYYCALWYSNHWVFGGGTKLTVL

SEQ ID NO: 496 - protein, 959 aa, Artificial Sequence
  Description of Artificial Sequence: Synthetic polypeptide
QVQLVQSGAEVKKPGASVKVSCKASGYTFSSYWMHWVRQAPGQRLEWMGEINPGNGHTNYSQKFQGRVTITVDKSASTAYMELSSLRSEDTAVYYCARSFTTARAFAYWGQGTLVTVSSASTKGPSVFPLAPSSKSTSGGTAALGCLVKDYFPEPVTVSWNSGALTSGVHTFPAVLQSSGLYSLSSVVTVPSSSLGTQTYICNVNHKPSNTKVDKRVEPKSCDKTHTCPPCPAPEFEGGPSVFLFPPKPKDTLMISRTPEVTCVVVDVSHEDPEVKFNWYVDGVEVHNAKTKPREEQYNSTYRVVSVLTVLHQDWLNGKEYKCKVSNKALPASIEKTISKAKGQPREPQVCTLPPSRDELTKNQVSLTCLVEGFYPSDIAVEWESNGQPENNYKTTPPVLDSDGSFFLYSDLTVDKSRWQQGNVFSCSVMHEALHNHYTQESLSLSPGKSGGGGSEVQLVESGGGLVQPGGSLRLSCAASGFTFSTYAMNWVRQAPGKGLEWVGRIRSKYNNYATYYADSVKGRFTISRDDSKNTLYLQMNSLRAEDTAVYYCVRHGNFGDSYVSWFEYWGQGTLVTVSSGGGGSGGGGSGGGGSGGGGSQAVVTQEPSLTVSPGGTVTLTCGSSTGAVTTSNYANWVQQKPGKSPRGLIGGTNKRAPGVPARFSGSLLGGKAALTISGAQPEDEADYYCALWYSNHWVFGGGTKLTVLSGGGGSQVQLVQSGAEVKKPGASVKVSCKASGYTFTDYFMNWVRQAPGQGLEWMGVINPYNDITIYNQKFQGRVTMTVDRSTSTVYMELSSLRSEDTAVYYCAREGVLYDGYYEGAYWGQGTLVTVSSGGGGSGGGGSGGGGSDIQLTQSPSFLSASVGDRVTITCKASQNVGIAVAWYQQKPGKAPKLLIYAASNRYTGVPSRFSGSGSGTEFTLTISSLQPEDFATYYCQQYSTYPYTFGQGTKLEIK

SEQ ID NO: 497 - protein, 986 aa, Artificial Sequence
  Description of Artificial Sequence: Synthetic polypeptide
QVQLVQSGAEVKKPGASVKVSCKASGYTFTDYFMNWVRQAPGQGLEWMGVINPYNDITIYNQKFQGRVTMTVDRSTSTVYMELSSLRSEDTAVYYCAREGVLYDGYYEGAYWGQGTLVTVSSGGGGSGGGGSGGGGSDIQLTQSPSFLSASVGDRVTITCKASQNVGIAVAWYQQKPGKAPKLLIYAASNRYTGVPSRFSGSGSGTEFTLTISSLQPEDFATYYCQQYSTYPYTFGQGTKLEIKSGGGSEVQLVESGGGLVQPGGSLRLSCAASGFTFSTYAMNWVRQAPGKGLEWVGRIRSKYNNYATYYADSVKGRFTISRDDSKNTLYLQMNSLRAEDTAVYYCVRHGNFGDSYVSWFEYWGQGTLVTVSSGKPGSGKPGSGKPGSGKPGSQAVVTQEPSLTVSPGGTVTLTCGSSTGAVTTSNYANWVQQKPGKSPRGLIGGTNKRAPGVPARFSGSLLGGKAALTISGAQPEDEADYYCALWYSNHWVFGGGTKLTVLEPKSSDKTHTCPPCPAPEFEGGPSVFLFPPKPKDTLMISRTPEVTCVVVDVSHEDPEVKFNWYVDGVEVHNAKTKPREEQYNSTYRVVSVLTVLHQDWLNGKEYKCKVSNKALPASIEKTISKAKGQPREPQVYTLPPCRKKLTKNQVSLTCLVKGFYPSDIAVEWESNGQPENNYKTTPPVLKSDGSFFLYSKLTVDKSRWQQGNVFSCSVMHEALHNHYTQKSLSLSPGKSGGGSQVQLVQSGAEVKKPGASVKVSCKASGYTFSSYWMHWVRQAPGQRLEWMGEINPGNGHTNYSQKFQGRVTITVDKSASTAYMELSSLRSEDTAVYYCARSFTTARAFAYWGQGTLVTVSSGKPGSGKPGSGKPGSGKPGSDIVMTQSPPTLSLSPGERVTLSCRASQSISDYLHWYQQKPGQSPRLLIKYASQSISGIPARFSGSGSGTDFTLTISSLEPEDFAVYYCQDGHSFPPTFGGGTKVEIK

SEQ ID NO: 498 - protein, 703 aa, Artificial Sequence
  Description of Artificial Sequence: Synthetic polypeptide
QVQLVQSGAEVKKPGASVKVSCKASGYTFTDYFMNWVRQAPGQGLEWMGVINPYNDITIYNQKFQGRVTMTVDRSTSTVYMELSSLRSEDTAVYYCAREGVLYDGYYEGAYWGQGTLVTVSSASTKGPSVFPLAPSSKSTSGGTAALGCLVKDYFPEPVTVSWNSGALTSGVHTFPAVLQSSGLYSLSSVVTVPSSSLGTQTYICNVNHKPSNTKVDKRVEPKSCDKTHTCPPCPAPEFEGGPSVFLFPPKPKDTLMISRTPEVTCVVVDVSHEDPEVKFNWYVDGVEVHNAKTKPREEQYNSTYRVVSVLTVLHQDWLNGKEYKCKVSNKALPASIEKTISKAKGQPREPQVCTLPPSRDELTKNQVSLTCLVEGFYPSDIAVEWESNGQPENNYKTTPPVLDSDGSFFLYSDLTVDKSRWQQGNVFSCSVMHEALHNHYTQESLSLSPGKSGGGSQVQLVQSGAEVKKPGASVKVSCKASGYTFSSYWMHWVRQAPGQRLEWMGEINPGNGHTNYSQKFQGRVTITVDKSASTAYMELSSLRSEDTAVYYCARSFTTARAFAYWGQGTLVTVSSGKPGSGKPGSGKPGSGKPGSDIVMTQSPPTLSLSPGERVTLSCRASQSISDYLHWYQQKPGQSPRLLIKYASQSISGIPARFSGSGSGTDFTLTISSLEPEDFAVYYCQDGHSFPPTFGGGTKVEIK

SEQ ID NO: 499 - protein, 954 aa, Artificial Sequence
  Description of Artificial Sequence: Synthetic polypeptide
QVQLVQSGAEVKKPGASVKVSCKASGYTFTDYFMNWVRQAPGQGLEWMGVINPYNDITIYNQKFQGRVTMTVDRSTSTVYMELSSLRSEDTAVYYCAREGVLYDGYYEGAYWGQGTLVTVSSASTKGPSVFPLAPSSKSTSGGTAALGCLVKDYFPEPVTVSWNSGALTSGVHTFPAVLQSSGLYSLSSVVTVPSSSLGTQTYICNVNHKPSNTKVDKRVEPKSCDKTHTCPPCPAPEFEGGPSVFLFPPKPKDTLMISRTPEVTCVVVDVSHEDPEVKFNWYVDGVEVHNAKTKPREEQYNSTYRVVSVLTVLHQDWLNGKEYKCKVSNKALPASIEKTISKAKGQPREPQVCTLPPSRDELTKNQVSLTCLVEGFYPSDIAVEWESNGQPENNYKTTPPVLDSDGSFFLYSDLTVDKSRWQQGNVFSCSVMHEALHNHYTQESLSLSPGKSGGGSQVQLVQSGAEVKKPGASVKVSCKASGYTFSSYWMHWVRQAPGQRLEWMGEINPGNGHTNYSQKFQGRVTITVDKSASTAYMELSSLRSEDTAVYYCARSFTTARAFAYWGQGTLVTVSSGKPGSGKPGSGKPGSGKPGSDIVMTQSPPTLSLSPGERVTLSCRASQSISDYLHWYQQKPGQSPRLLIKYASQSISGIPARFSGSGSGTDFTLTISSLEPEDFAVYYCQDGHSFPPTFGGGTKVEIKSGGGSQVQLVQSGAEVKKPGASVKVSCKASGYTFSSYWMHWVRQAPGQRLEWMGEINPGNGHTNYSQKFQGRVTITVDKSASTAYMELSSLRSEDTAVYYCARSFTTARAFAYWGQGTLVTVSSGKPGSGKPGSGKPGSGKPGSDIVMTQSPPTLSLSPGERVTLSCRASQSISDYLHWYQQKPGQSPRLLIKYASQSISGIPARFSGSGSGTDFTLTISSLEPEDFAVYYCQDGHSFPPTFGGGTKVEIK

SEQ ID NO: 500 - protein, 731 aa, Artificial Sequence
  Description of Artificial Sequence: Synthetic polypeptide
QVQLVQSGAEVKKPGASVKVSCKASGYTFTSYYIHWVRQAPGQGLEWIGSIYPGNVNTNYNEKFKDRATLTVDTSISTAYMELSRLRSDDTAVYFCTRSHYGLDWNFDVWGQGTTVTVSSGGGGSGGGGSGGGGSGGGGSDIQMTQSPSSLSASVGDRVTITCHASQNIYVWLNWYQQKPGKAPKLLIYKASNLHTGVPSRFSGSGSGTDFTLTISSLQPEDFATYYCQQGQTYPYTFGGGTKVEIKSGGGGSQVQLVQSGAEVKKPGASVKVSCKASGYTFSSYWMHWVRQAPGQRLEWMGEINPGNGHTNYSQKFQGRVTITVDKSASTAYMELSSLRSEDTAVYYCARSFTTARAFAYWGQGTLVTVSSGKPGSGKPGSGKPGSGKPGSDIVMTQSPPTLSLSPGERVTLSCRASQSISDYLHWYQQKPGQSPRLLIKYASQSISGIPARFSGSGSGTDFTLTISSLEPEDFAVYYCQDGHSFPPTFGGGTKVEIKEPKSSDKTHTCPPCPAPEFEGGPSVFLFPPKPKDTLMISRTPEVTCVVVDVSHEDPEVKFNWYVDGVEVHNAKTKPREEQYNSTYRVVSVLTVLHQDWLNGKEYKCKVSNKALPASIEKTISKAKGQPREPQVYTLPPCRKKLTKNQVSLTCLVKGFYPSDIAVEWESNGQPENNYKTTPPVLKSDGSFFLYSKLTVDKSRWQQGNVFSCSVMHEALHNHYTQKSLSLSPGK

SEQ ID NO: 501 - protein, 732 aa, Artificial Sequence
  Description of Artificial Sequence: Synthetic polypeptide
QVQLVQSGAEVKKPGASVKVSCKASGYTFTSYYIHWVRQAPGQGLEWIGSIYPGNVNTNYNEKFKDRATLTVDTSISTAYMELSRLRSDDTAVYFCTRSHYGLDWNFDVWGQGTTVTVSSGGGGSGGGGSGGGGSGGGGSDIQMTQSPSSLSASVGDRVTITCHASQNIYVWLNWYQQKPGKAPKLLIYKASNLHTGVPSRFSGSGSGTDFTLTISSLQPEDFATYYCQQGQTYPYTFGGGTKVEIKSGGGGSEVQLVESGGGLVQPGGSLRLSCAASGFTFSDYWMSWVRQAPGKGLEWVADIKNDGSYTNYAPSLTNRFTISRDNAKNSLYLQMNSLRAEDTAVYYCARELTGTWGQGTMVTVSSGKPGSGKPGSGKPGSGKPGSDIVMTQSPDSLAVSLGERATINCKSSQSLLSSGNQKNYLAWYQQKPGQPPKLLIYYASTRQSGVPDRFSGSGSGTDFTLTISSLQAEDVAVYYCLQYDRYPFTFGQGTKLEIKEPKSSDKTHTCPPCPAPEFEGGPSVFLFPPKPKDTLMISRTPEVTCVVVDVSHEDPEVKFNWYVDGVEVHNAKTKPREEQYNSTYRVVSVLTVLHQDWLNGKEYKCKVSNKALPASIEKTISKAKGQPREPQVYTLPPCRKKLTKNQVSLTCLVKGFYPSDIAVEWESNGQPENNYKTTPPVLKSDGSFFLYSKLTVDKSRWQQGNVFSCSVMHEALHNHYTQKSLSLSPGK

SEQ ID NO: 502 - protein, 731 aa, Artificial Sequence
  Description of Artificial Sequence: Synthetic polypeptide
QVQLVQSGAEVKKPGASVKVSCKASGYTFSSYWMHWVRQAPGQRLEWMGEINPGNGHTNYSQKFQGRVTITVDKSASTAYMELSSLRSEDTAVYYCARSFTTARAFAYWGQGTLVTVSSGGGGSGGGGSGGGGSGGGGSDIVMTQSPPTLSLSPGERVTLSCRASQSISDYLHWYQQKPGQSPRLLIKYASQSISGIPARFSGSGSGTDFTLTISSLEPEDFAVYYCQDGHSFPPTFGGGTKVEIKSGGGGSQVQLVQSGAEVKKPGASVKVSCKASGYTFTSYYIHWVRQAPGQGLEWIGSIYPGNVNTNYNEKFKDRATLTVDTSISTAYMELSRLRSDDTAVYFCTRSHYGLDWNFDVWGQGTTVTVSSGKPGSGKPGSGKPGSGKPGSDIQMTQSPSSLSASVGDRVTITCHASQNIYVWLNWYQQKPGKAPKLLIYKASNLHTGVPSRFSGSGSGTDFTLTISSLQPEDFATYYCQQGQTYPYTFGGGTKVEIKEPKSSDKTHTCPPCPAPEFEGGPSVFLFPPKPKDTLMISRTPEVTCVVVDVSHEDPEVKFNWYVDGVEVHNAKTKPREEQYNSTYRVVSVLTVLHQDWLNGKEYKCKVSNKALPASIEKTISKAKGQPREPQVYTLPPCRKKLTKNQVSLTCLVKGFYPSDIAVEWESNGQPENNYKTTPPVLKSDGSFFLYSKLTVDKSRWQQGNVFSCSVMHEALHNHYTQKSLSLSPGK

SEQ ID NO: 503 - protein, 732 aa, Artificial Sequence
  Description of Artificial Sequence: Synthetic polypeptide
EVQLVESGGGLVQPGGSLRLSCAASGFTFSDYWMSWVRQAPGKGLEWVADIKNDGSYTNYAPSLTNRFTISRDNAKNSLYLQMNSLRAEDTAVYYCARELTGTWGQGTMVTVSSGGGGSGGGGSGGGGSGGGGSDIVMTQSPDSLAVSLGERATINCKSSQSLLSSGNQKNYLAWYQQKPGQPPKLLIYYASTRQSGVPDRFSGSGSGTDFTLTISSLQAEDVAVYYCLQYDRYPFTFGQGTKLEIKSGGGGSQVQLVQSGAEVKKPGASVKVSCKASGYTFTSYYIHWVRQAPGQGLEWIGSIYPGNVNTNYNEKFKDRATLTVDTSISTAYMELSRLRSDDTAVYFCTRSHYGLDWNFDVWGQGTTVTVSSGKPGSGKPGSGKPGSGKPGSDIQMTQSPSSLSASVGDRVTITCHASQNIYVWLNWYQQKPGKAPKLLIYKASNLHTGVPSRFSGSGSGTDFTLTISSLQPEDFATYYCQQGQTYPYTFGGGTKVEIKEPKSSDKTHTCPPCPAPEFEGGPSVFLFPPKPKDTLMISRTPEVTCVVVDVSHEDPEVKFNWYVDGVEVHNAKTKPREEQYNSTYRVVSVLTVLHQDWLNGKEYKCKVSNKALPASIEKTISKAKGQPREPQVYTLPPCRKKLTKNQVSLTCLVKGFYPSDIAVEWESNGQPENNYKTTPPVLKSDGSFFLYSKLTVDKSRWQQGNVFSCSVMHEALHNHYTQKSLSLSPGK
